United States Patent Application Publication US 2023/0392155 A1 - sequence listing, part 2

SEQ ID NO: 2897 - RNA, 23 nt, synthetic construct
  source 1..23: mol_type = other RNA
  modified_base 1: mod_base = OTHER; note = 2'-O-methylcytidine-3'-phosphorothioate
  modified_base 2: mod_base = OTHER; note = 2'-deoxy-2'-fluorouridine-3'-phosphorothioate
  modified_base 3: mod_base = OTHER; note = 2'-O-methyluridine-3'-phosphate
  modified_base 4: mod_base = OTHER; note = 2'-O-methylguanosine-3'-phosphate
  modified_base 5: mod_base = OTHER; note = 2'-O-methylguanosine-3'-phosphate
  modified_base 6: mod_base = OTHER; note = 2'-deoxy-2'-fluorouridine-3'-phosphate
  modified_base 7: mod_base = OTHER; note = 2'-O-methylguanosine-3'-phosphate
  modified_base 8: mod_base = OTHER; note = 2'-deoxy-2'-fluoroadenosine-3'-phosphate
  modified_base 9: mod_base = OTHER; note = 2'-deoxy-2'-fluorocytidine-3'-phosphate
  modified_base 10: mod_base = OTHER; note = 2'-O-methyluridine-3'-phosphate
  modified_base 11: mod_base = OTHER; note = 2'-O-methyluridine-3'-phosphate
  modified_base 12: mod_base = OTHER; note = 2'-O-methylcytidine-3'-phosphate
  modified_base 13: mod_base = OTHER; note = 2'-O-methyluridine-3'-phosphate
  modified_base 14: mod_base = OTHER; note = 2'-deoxy-2'-fluorocytidine-3'-phosphate
  modified_base 15: mod_base = OTHER; note = 2'-O-methylguanosine-3'-phosphate
  modified_base 16: mod_base = OTHER; note = 2'-deoxy-2'-fluoroguanosine-3'-phosphate
  modified_base 17: mod_base = OTHER; note = 2'-O-methyluridine-3'-phosphate
  modified_base 18: mod_base = OTHER; note = 2'-O-methylcytidine-3'-phosphate
  modified_base 19: mod_base = OTHER; note = 2'-O-methylcytidine-3'-phosphate
  modified_base 20: mod_base = OTHER; note = 2'-O-methyluridine-3'-phosphate
  modified_base 21: mod_base = OTHER; note = 2'-O-methyluridine-3'-phosphorothioate
  modified_base 22: mod_base = OTHER; note = 2'-O-methylguanosine-3'-phosphorothioate
  modified_base 23: mod_base = OTHER; note = 2'-O-methyluridine
cttggtgacttctcggtccttgt

SEQ ID NO: 2898 - RNA, 21 nt, synthetic construct
  source 1..21: mol_type = other RNA
  modified_base 1: mod_base = OTHER; note = 2'-O-methyladenosine-3'-phosphorothioate
  modified_base 2: mod_base = OTHER; note = 2'-O-methyladenosine-3'-phosphorothioate
  modified_base 3: mod_base = OTHER; note = 2'-O-methyladenosine-3'-phosphate
  modified_base 4: mod_base = OTHER; note = 2'-O-methylcytidine-3'-phosphate
  modified_base 5: mod_base = OTHER; note = 2'-O-methyladenosine-3'-phosphate
  modified_base 6: mod_base = OTHER; note = 2'-O-methyluridine-3'-phosphate
  modified_base 7: mod_base = OTHER; note = 2'-deoxy-2'-fluoroguanosine-3'-phosphate
  modified_base 8: mod_base = OTHER; note = 2'-O-methylguanosine-3'-phosphate
  modified_base 9: mod_base = OTHER; note = 2'-deoxy-2'-fluorocytidine-3'-phosphate
  modified_base 10: mod_base = OTHER; note = 2'-deoxy-2'-fluorouridine-3'-phosphate
  modified_base 11: mod_base = OTHER; note = 2'-deoxy-2'-fluorouridine-3'-phosphate
  modified_base 12: mod_base = OTHER; note = 2'-O-methylguanosine-3'-phosphate
  modified_base 13: mod_base = OTHER; note = 2'-O-methyladenosine-3'-phosphate
  modified_base 14: mod_base = OTHER; note = 2'-O-methyladenosine-3'-phosphate
  modified_base 15: mod_base = OTHER; note = 2'-O-methyluridine-3'-phosphate
  modified_base 16: mod_base = OTHER; note = 2'-O-methylguanosine-3'-phosphate
  modified_base 17: mod_base = OTHER; note = 2'-O-methylguanosine-3'-phosphate
  modified_base 18: mod_base = OTHER; note = 2'-O-methylguanosine-3'-phosphate
  modified_base 19: mod_base = OTHER; note = 2'-O-methyladenosine-3'-phosphate
  modified_base 20: mod_base = OTHER; note = 2'-O-methyluridine-3'-phosphate
  modified_base 21: mod_base = OTHER; note = 2'-O-methylcytidine-3'-phosphate ((2S,4R)-1-[29-[[2-(acetylamino)-2-deoxy-beta-D-galactopyra nosyl]oxy]-14,14-bis[[3-[[3-[[5-[[2-(acetylamino)-2-deoxy-b eta-D-galactopyranosyl]oxy]-1-oxopentyl]amino]propyl]amino] -3-oxopropoxy]methyl]-1,12,19,25-tetraoxo-16-oxa-13,20,24-t riazanonacos-1-yl]-4-hydroxy-2-pyrrolidinyl)methyl ester
aaacatggcttgaatgggatc

SEQ ID NO: 2899 - RNA, 23 nt, synthetic construct
  source 1..23: mol_type = other RNA
  modified_base 1: mod_base = OTHER; note = 2'-O-methylguanosine-3'-phosphorothioate
  modified_base 2: mod_base = OTHER; note = 2'-deoxy-2'-fluoroadenosine-3'-phosphorothioate
  modified_base 3: mod_base = OTHER; note = 2'-O-methyluridine-3'-phosphate
  modified_base 4: mod_base = OTHER; note = 2'-O-methylcytidine-3'-phosphate
  modified_base 5: mod_base = OTHER; note = 2'-O-methylcytidine-3'-phosphate
  modified_base 6: mod_base = OTHER; note = 2'-deoxy-2'-fluorocytidine-3'-phosphate
  modified_base 7: mod_base = OTHER; note = 2'-O-methyladenosine-3'-phosphate
  modified_base 8: mod_base = OTHER; note = 2'-deoxy-2'-fluorouridine-3'-phosphate
  modified_base 9: mod_base = OTHER; note = 2'-deoxy-2'-fluorouridine-3'-phosphate
  modified_base 10: mod_base = OTHER; note = 2'-O-methylcytidine-3'-phosphate
  modified_base 11: mod_base = OTHER; note = 2'-O-methyladenosine-3'-phosphate
  modified_base 12: mod_base = OTHER; note = 2'-O-methyladenosine-3'-phosphate
  modified_base 13: mod_base = OTHER; note = 2'-O-methylguanosine-3'-phosphate
  modified_base 14: mod_base = OTHER; note = 2'-deoxy-2'-fluorocytidine-3'-phosphate
  modified_base 15: mod_base = OTHER; note = 2'-O-methylcytidine-3'-phosphate
  modified_base 16: mod_base = OTHER; note = 2'-deoxy-2'-fluoroadenosine-3'-phosphate
  modified_base 17: mod_base = OTHER; note = 2'-O-methyluridine-3'-phosphate
  modified_base 18: mod_base = OTHER; note = 2'-O-methylguanosine-3'-phosphate
  modified_base 19: mod_base = OTHER; note = 2'-O-methyluridine-3'-phosphate
  modified_base 20: mod_base = OTHER; note = 2'-O-methyluridine-3'-phosphate
  modified_base 21: mod_base = OTHER; note = 2'-O-methyluridine-3'-phosphorothioate
  modified_base 22: mod_base = OTHER; note = 2'-O-methyladenosine-3'-phosphorothioate
  modified_base 23: mod_base = OTHER; note = 2'-O-methyladenosine
gatcccattcaagccatgtttaa

SEQ ID NO: 2900 - RNA, 21 nt, synthetic construct
  source 1..21: mol_type = other RNA
  modified_base 1: mod_base = OTHER; note = 2'-O-methyladenosine-3'-phosphorothioate
  modified_base 2: mod_base = OTHER; note = 2'-O-methyladenosine-3'-phosphorothioate
  modified_base 3: mod_base = OTHER; note = 2'-O-methylcytidine-3'-phosphate
  modified_base 4: mod_base = OTHER; note = 2'-O-methyladenosine-3'-phosphate
  modified_base 5: mod_base = OTHER; note = 2'-O-methyluridine-3'-phosphate
  modified_base 6: mod_base = OTHER; note = 2'-O-methylguanosine-3'-phosphate
  modified_base 7: mod_base = OTHER; note = 2'-deoxy-2'-fluoroguanosine-3'-phosphate
  modified_base 8: mod_base = OTHER; note = 2'-O-methylcytidine-3'-phosphate
  modified_base 9: mod_base = OTHER; note = 2'-deoxy-2'-fluorouridine-3'-phosphate
  modified_base 10: mod_base = OTHER; note = 2'-deoxy-2'-fluorouridine-3'-phosphate
  modified_base 11: mod_base = OTHER; note = 2'-deoxy-2'-fluoroguanosine-3'-phosphate
  modified_base 12: mod_base = OTHER; note = 2'-O-methyladenosine-3'-phosphate
  modified_base 13: mod_base = OTHER; note = 2'-O-methyladenosine-3'-phosphate
  modified_base 14: mod_base = OTHER; note = 2'-O-methyluridine-3'-phosphate
  modified_base 15: mod_base = OTHER; note = 2'-O-methylguanosine-3'-phosphate
  modified_base 16: mod_base = OTHER; note = 2'-O-methylguanosine-3'-phosphate
  modified_base 17: mod_base = OTHER; note = 2'-O-methylguanosine-3'-phosphate
  modified_base 18: mod_base = OTHER; note = 2'-O-methyladenosine-3'-phosphate
  modified_base 19: mod_base = OTHER; note = 2'-O-methyluridine-3'-phosphate
  modified_base 20: mod_base = OTHER; note = 2'-O-methylcytidine-3'-phosphate
  modified_base 21: mod_base = OTHER; note = 2'-O-methyluridine-3'-phosphate ((2S,4R)-1-[29-[[2-(acetylamino)-2-deoxy-beta-D-galactopyra nosyl]oxy]-14,14-bis[[3-[[3-[[5-[[2-(acetylamino)-2-deoxy-b eta-D-galactopyranosyl]oxy]-1-oxopentyl]amino]propyl]amino] -3-oxopropoxy]methyl]-1,12,19,25-tetraoxo-16-oxa-13,20,24-t riazanonacos-1-yl]-4-hydroxy-2-pyrrolidinyl)methyl ester
aacatggcttgaatgggatct

SEQ ID NO: 2901 - RNA, 23 nt, synthetic construct
  source 1..23: mol_type = other RNA
  modified_base 1: mod_base = OTHER; note = 2'-O-methyladenosine-3'-phosphorothioate
  modified_base 2: mod_base = OTHER; note = 2'-deoxy-2'-fluoroguanosine-3'-phosphorothioate
  modified_base 3: mod_base = OTHER; note = 2'-O-methyladenosine-3'-phosphate
  modified_base 4: mod_base = OTHER; note = 2'-O-methyluridine-3'-phosphate
  modified_base 5: mod_base = OTHER; note = 2'-O-methylcytidine-3'-phosphate
  modified_base 6: mod_base = OTHER; note = 2'-deoxy-2'-fluorocytidine-3'-phosphate
  modified_base 7: mod_base = OTHER; note = 2'-O-methylcytidine-3'-phosphate
  modified_base 8: mod_base = OTHER; note = 2'-deoxy-2'-fluoroadenosine-3'-phosphate
  modified_base 9: mod_base = OTHER; note = 2'-deoxy-2'-fluorouridine-3'-phosphate
  modified_base 10: mod_base = OTHER; note = 2'-O-methyluridine-3'-phosphate
  modified_base 11: mod_base = OTHER; note = 2'-O-methylcytidine-3'-phosphate
  modified_base 12: mod_base = OTHER; note = 2'-O-methyladenosine-3'-phosphate
  modified_base 13: mod_base = OTHER; note = 2'-O-methyladenosine-3'-phosphate
  modified_base 14: mod_base = OTHER; note = 2'-deoxy-2'-fluoroguanosine-3'-phosphate
  modified_base 15: mod_base = OTHER; note = 2'-O-methylcytidine-3'-phosphate
  modified_base 16: mod_base = OTHER; note = 2'-deoxy-2'-fluorocytidine-3'-phosphate
  modified_base 17: mod_base = OTHER; note = 2'-O-methyladenosine-3'-phosphate
  modified_base 18: mod_base = OTHER; note = 2'-O-methyluridine-3'-phosphate
  modified_base 19: mod_base = OTHER; note = 2'-O-methylguanosine-3'-phosphate
  modified_base 20: mod_base = OTHER; note = 2'-O-methyluridine-3'-phosphate
  modified_base 21: mod_base = OTHER; note = 2'-O-methyluridine-3'-phosphorothioate
  modified_base 22: mod_base = OTHER; note = 2'-O-methyluridine-3'-phosphorothioate
  modified_base 23: mod_base = OTHER; note = 2'-O-methyladenosine
agatcccattcaagccatgttta

SEQ ID NO: 2902 - RNA, 21 nt, synthetic construct
  source 1..21: mol_type = other RNA
  modified_base 1: mod_base = OTHER; note = 2'-O-methyluridine-3'-phosphorothioate
  modified_base 2: mod_base = OTHER; note = 2'-O-methylguanosine-3'-phosphorothioate
  modified_base 3: mod_base = OTHER; note = 2'-O-methyluridine-3'-phosphate
  modified_base 4: mod_base = OTHER; note = 2'-O-methyluridine-3'-phosphate
  modified_base 5: mod_base = OTHER; note = 2'-O-methyladenosine-3'-phosphate
  modified_base 6: mod_base = OTHER; note = 2'-O-methyladenosine-3'-phosphate
  modified_base 7: mod_base = OTHER; note = 2'-deoxy-2'-fluoroadenosine-3'-phosphate
  modified_base 8: mod_base = OTHER; note = 2'-O-methylcytidine-3'-phosphate
  modified_base 9: mod_base = OTHER; note = 2'-deoxy-2'-fluoroadenosine-3'-phosphate
  modified_base 10: mod_base = OTHER; note = 2'-deoxy-2'-fluorouridine-3'-phosphate
  modified_base 11: mod_base = OTHER; note = 2'-deoxy-2'-fluoroguanosine-3'-phosphate
  modified_base 12: mod_base = OTHER; note = 2'-O-methylguanosine-3'-phosphate
  modified_base 13: mod_base = OTHER; note = 2'-O-methylcytidine-3'-phosphate
  modified_base 14: mod_base = OTHER; note = 2'-O-methyluridine-3'-phosphate
  modified_base 15: mod_base = OTHER; note = 2'-O-methyluridine-3'-phosphate
  modified_base 16: mod_base = OTHER; note = 2'-O-methylguanosine-3'-phosphate
  modified_base 17: mod_base = OTHER; note = 2'-O-methyladenosine-3'-phosphate
  modified_base 18: mod_base = OTHER; note = 2'-O-methyladenosine-3'-phosphate
  modified_base 19: mod_base = OTHER; note = 2'-O-methyluridine-3'-phosphate
  modified_base 20: mod_base = OTHER; note = 2'-O-methylguanosine-3'-phosphate
  modified_base 21: mod_base = OTHER; note = 2'-O-methylguanosine-3'-phosphate ((2S,4R)-1-[29-[[2-(acetylamino)-2-deoxy-beta-D-galactopyra nosyl]oxy]-14,14-bis[[3-[[3-[[5-[[2-(acetylamino)-2-deoxy-b eta-D-galactopyranosyl]oxy]-1-oxopentyl]amino]propyl]amino] -3-oxopropoxy]methyl]-1,12,19,25-tetraoxo-16-oxa-13,20,24-t riazanonacos-1-yl]-4-hydroxy-2-pyrrolidinyl)methyl ester
tgttaaacatggcttgaatgg

SEQ ID NO: 2903 - RNA, 23 nt, synthetic construct
  source 1..23: mol_type = other RNA
  modified_base 1: mod_base = OTHER; note = 2'-O-methylcytidine-3'-phosphorothioate
  modified_base 2: mod_base = OTHER; note = 2'-deoxy-2'-fluorocytidine-3'-phosphorothioate
  modified_base 3: mod_base = OTHER; note = 2'-O-methyladenosine-3'-phosphate
  modified_base 4: mod_base = OTHER; note = 2'-O-methyluridine-3'-phosphate
  modified_base 5: mod_base = OTHER; note = 2'-O-methyluridine-3'-phosphate
  modified_base 6: mod_base = OTHER; note = 2'-deoxy-2'-fluorocytidine-3'-phosphate
  modified_base 7: mod_base = OTHER; note = 2'-O-methyladenosine-3'-phosphate
  modified_base 8: mod_base = OTHER; note = 2'-deoxy-2'-fluoroadenosine-3'-phosphate
  modified_base 9: mod_base = OTHER; note = 2'-deoxy-2'-fluoroguanosine-3'-phosphate
  modified_base 10: mod_base = OTHER; note = 2'-O-methylcytidine-3'-phosphate
  modified_base 11: mod_base = OTHER; note = 2'-O-methylcytidine-3'-phosphate
  modified_base 12: mod_base = OTHER; note = 2'-O-methyladenosine-3'-phosphate
  modified_base 13: mod_base = OTHER; note = 2'-O-methyluridine-3'-phosphate
  modified_base 14: mod_base = OTHER; note = 2'-deoxy-2'-fluoroguanosine-3'-phosphate
  modified_base 15: mod_base = OTHER; note = 2'-O-methyluridine-3'-phosphate
  modified_base 16: mod_base = OTHER; note = 2'-deoxy-2'-fluorouridine-3'-phosphate
  modified_base 17: mod_base = OTHER; note = 2'-O-methyluridine-3'-phosphate
  modified_base 18: mod_base = OTHER; note = 2'-O-methyladenosine-3'-phosphate
  modified_base 19: mod_base = OTHER; note = 2'-O-methyladenosine-3'-phosphate
  modified_base 20: mod_base = OTHER; note = 2'-O-methylcytidine-3'-phosphate
  modified_base 21: mod_base = OTHER; note = 2'-O-methyladenosine-3'-phosphorothioate
  modified_base 22: mod_base = OTHER; note = 2'-O-methylguanosine-3'-phosphorothioate
  modified_base 23: mod_base = OTHER; note = 2'-O-methylcytidine
ccattcaagccatgtttaacagc

SEQ ID NO: 2904 - RNA, 21 nt, synthetic construct
  source 1..21: mol_type = other RNA
  modified_base 1: mod_base = OTHER; note = 2'-O-methylcytidine-3'-phosphorothioate
  modified_base 2: mod_base = OTHER; note = 2'-O-methyluridine-3'-phosphorothioate
  modified_base 3: mod_base = OTHER; note = 2'-O-methylguanosine-3'-phosphate
  modified_base 4: mod_base = OTHER; note = 2'-O-methyluridine-3'-phosphate
  modified_base 5: mod_base = OTHER; note = 2'-O-methyluridine-3'-phosphate
  modified_base 6: mod_base = OTHER; note = 2'-O-methyladenosine-3'-phosphate
  modified_base 7: mod_base = OTHER; note = 2'-deoxy-2'-fluoroadenosine-3'-phosphate
  modified_base 8: mod_base = OTHER; note = 2'-O-methyladenosine-3'-phosphate
  modified_base 9: mod_base = OTHER; note = 2'-deoxy-2'-fluorocytidine-3'-phosphate
  modified_base 10: mod_base = OTHER; note = 2'-deoxy-2'-fluoroadenosine-3'-phosphate
  modified_base 11: mod_base = OTHER; note = 2'-deoxy-2'-fluorouridine-3'-phosphate
  modified_base 12: mod_base = OTHER; note = 2'-O-methylguanosine-3'-phosphate
  modified_base 13: mod_base = OTHER; note = 2'-O-methylguanosine-3'-phosphate
  modified_base 14: mod_base = OTHER; note = 2'-O-methylcytidine-3'-phosphate
  modified_base 15: mod_base = OTHER; note = 2'-O-methyluridine-3'-phosphate
  modified_base 16: mod_base = OTHER; note = 2'-O-methyluridine-3'-phosphate
  modified_base 17: mod_base = OTHER; note = 2'-O-methylguanosine-3'-phosphate
  modified_base 18: mod_base = OTHER; note = 2'-O-methyladenosine-3'-phosphate
  modified_base 19: mod_base = OTHER; note = 2'-O-methyladenosine-3'-phosphate
  modified_base 20: mod_base = OTHER; note = 2'-O-methyluridine-3'-phosphate
  modified_base 21: mod_base = OTHER; note = 2'-O-methylguanosine-3'-phosphate ((2S,4R)-1-[29-[[2-(acetylamino)-2-deoxy-beta-D-galactopyra nosyl]oxy]-14,14-bis[[3-[[3-[[5-[[2-(acetylamino)-2-deoxy-b eta-D-galactopyranosyl]oxy]-1-oxopentyl]amino]propyl]amino] -3-oxopropoxy]methyl]-1,12,19,25-tetraoxo-16-oxa-13,20,24-t riazanonacos-1-yl]-4-hydroxy-2-pyrrolidinyl)methyl ester
ctgttaaacatggcttgaatg

SEQ ID NO: 2905 - RNA, 23 nt, synthetic construct
  source 1..23: mol_type = other RNA
  modified_base 1: mod_base = OTHER; note = 2'-O-methylcytidine-3'-phosphorothioate
  modified_base 2: mod_base = OTHER; note = 2'-deoxy-2'-fluoroadenosine-3'-phosphorothioate
  modified_base 3: mod_base = OTHER; note = 2'-O-methyluridine-3'-phosphate
  modified_base 4: mod_base = OTHER; note = 2'-O-methyluridine-3'-phosphate
  modified_base 5: mod_base = OTHER; note = 2'-O-methylcytidine-3'-phosphate
  modified_base 6: mod_base = OTHER; note = 2'-deoxy-2'-fluoroadenosine-3'-phosphate
  modified_base 7: mod_base = OTHER; note = 2'-O-methyladenosine-3'-phosphate
  modified_base 8: mod_base = OTHER; note = 2'-deoxy-2'-fluoroguanosine-3'-phosphate
  modified_base 9: mod_base = OTHER; note = 2'-deoxy-2'-fluorocytidine-3'-phosphate
  modified_base 10: mod_base = OTHER; note = 2'-O-methylcytidine-3'-phosphate
  modified_base 11: mod_base = OTHER; note = 2'-O-methyladenosine-3'-phosphate
  modified_base 12: mod_base = OTHER; note = 2'-O-methyluridine-3'-phosphate
  modified_base 13: mod_base = OTHER; note = 2'-O-methylguanosine-3'-phosphate
  modified_base 14: mod_base = OTHER; note = 2'-deoxy-2'-fluorouridine-3'-phosphate
  modified_base 15: mod_base = OTHER; note = 2'-O-methyluridine-3'-phosphate
  modified_base 16: mod_base = OTHER; note = 2'-deoxy-2'-fluorouridine-3'-phosphate
  modified_base 17: mod_base = OTHER; note = 2'-O-methyladenosine-3'-phosphate
  modified_base 18: mod_base = OTHER; note = 2'-O-methyladenosine-3'-phosphate
  modified_base 19: mod_base = OTHER; note = 2'-O-methylcytidine-3'-phosphate
  modified_base 20: mod_base = OTHER; note = 2'-O-methyladenosine-3'-phosphate
  modified_base 21: mod_base = OTHER; note = 2'-O-methylguanosine-3'-phosphorothioate
  modified_base 22: mod_base = OTHER; note = 2'-O-methylcytidine-3'-phosphorothioate
  modified_base 23: mod_base = OTHER; note = 2'-O-methylcytidine
cattcaagccatgtttaacagcc

SEQ ID NO: 2906 - RNA, 21 nt, synthetic construct
  source 1..21: mol_type = other RNA
  modified_base 1: mod_base = OTHER; note = 2'-O-methylguanosine-3'-phosphorothioate
  modified_base 2: mod_base = OTHER; note = 2'-O-methyladenosine-3'-phosphorothioate
  modified_base 3: mod_base = OTHER; note = 2'-O-methylcytidine-3'-phosphate
  modified_base 4: mod_base = OTHER; note = 2'-O-methyluridine-3'-phosphate
  modified_base 5: mod_base = OTHER; note = 2'-O-methyluridine-3'-phosphate
  modified_base 6: mod_base = OTHER; note = 2'-O-methylguanosine-3'-phosphate
  modified_base 7: mod_base = OTHER; note = 2'-deoxy-2'-fluorocytidine-3'-phosphate
  modified_base 8: mod_base = OTHER; note = 2'-O-methyluridine-3'-phosphate
  modified_base 9: mod_base = OTHER; note = 2'-deoxy-2'-fluoroguanosine-3'-phosphate
  modified_base 10: mod_base = OTHER; note = 2'-deoxy-2'-fluorocytidine-3'-phosphate
  modified_base 11: mod_base = OTHER; note = 2'-deoxy-2'-fluoroadenosine-3'-phosphate
  modified_base 12: mod_base = OTHER; note = 2'-O-methyluridine-3'-phosphate
  modified_base 13: mod_base = OTHER; note = 2'-O-methyladenosine-3'-phosphate
  modified_base 14: mod_base = OTHER; note = 2'-O-methyluridine-3'-phosphate
  modified_base 15: mod_base = OTHER; note = 2'-O-methylguanosine-3'-phosphate
  modified_base 16: mod_base = OTHER; note = 2'-O-methyluridine-3'-phosphate
  modified_base 17: mod_base = OTHER; note = 2'-O-methylguanosine-3'-phosphate
  modified_base 18: mod_base = OTHER; note = 2'-O-methylguanosine-3'-phosphate
  modified_base 19: mod_base = OTHER; note = 2'-O-methylcytidine-3'-phosphate
  modified_base 20: mod_base = OTHER; note = 2'-O-methyluridine-3'-phosphate
  modified_base 21: mod_base = OTHER; note = 2'-O-methyladenosine-3'-phosphate ((2S,4R)-1-[29-[[2-(acetylamino)-2-deoxy-beta-D-galactopyra nosyl]oxy]-14,14-bis[[3-[[3-[[5-[[2-(acetylamino)-2-deoxy-b eta-D-galactopyranosyl]oxy]-1-oxopentyl]amino]propyl]amino] -3-oxopropoxy]methyl]-1,12,19,25-tetraoxo-16-oxa-13,20,24-t riazanonacos-1-yl]-4-hydroxy-2-pyrrolidinyl)methyl ester
gacttgctgcatatgtggcta

SEQ ID NO: 2907 - RNA, 23 nt, synthetic construct
  source 1..23: mol_type = other RNA
  modified_base 1: mod_base = OTHER; note = 2'-O-methyluridine-3'-phosphorothioate
  modified_base 2: mod_base = OTHER; note = 2'-deoxy-2'-fluoroadenosine-3'-phosphorothioate
  modified_base 3: mod_base = OTHER; note = 2'-O-methylguanosine-3'-phosphate
  modified_base 4: mod_base = OTHER; note = 2'-O-methylcytidine-3'-phosphate
  modified_base 5: mod_base = OTHER; note = 2'-O-methylcytidine-3'-phosphate
  modified_base 6: mod_base = OTHER; note = 2'-deoxy-2'-fluoroadenosine-3'-phosphate
  modified_base 7: mod_base = OTHER; note = 2'-O-methylcytidine-3'-phosphate
  modified_base 8: mod_base = OTHER; note = 2'-deoxy-2'-fluoroadenosine-3'-phosphate
  modified_base 9: mod_base = OTHER; note = 2'-deoxy-2'-fluorouridine-3'-phosphate
  modified_base 10: mod_base = OTHER; note = 2'-O-methyladenosine-3'-phosphate
  modified_base 11: mod_base = OTHER; note = 2'-O-methyluridine-3'-phosphate
  modified_base 12: mod_base = OTHER; note = 2'-O-methylguanosine-3'-phosphate
  modified_base 13: mod_base = OTHER; note = 2'-O-methylcytidine-3'-phosphate
  modified_base 14: mod_base = OTHER; note = 2'-deoxy-2'-fluoroadenosine-3'-phosphate
  modified_base 15: mod_base = OTHER; note = 2'-O-methylguanosine-3'-phosphate
  modified_base 16: mod_base = OTHER; note = 2'-deoxy-2'-fluorocytidine-3'-phosphate
  modified_base 17: mod_base = OTHER; note = 2'-O-methyladenosine-3'-phosphate
  modified_base 18: mod_base = OTHER; note = 2'-O-methyladenosine-3'-phosphate
  modified_base 19: mod_base = OTHER; note = 2'-O-methylguanosine-3'-phosphate
  modified_base 20: mod_base = OTHER; note = 2'-O-methyluridine-3'-phosphate
  modified_base 21: mod_base = OTHER; note = 2'-O-methylcytidine-3'-phosphorothioate
  modified_base 22: mod_base = OTHER; note = 2'-O-methylcytidine-3'-phosphorothioate
  modified_base 23: mod_base = OTHER; note = 2'-O-methyladenosine
tagccacatatgcagcaagtcca

SEQ ID NO: 2908 - RNA, 21 nt, synthetic construct
  source 1..21: mol_type = other RNA
  modified_base 1: mod_base = OTHER; note = 2'-O-methyladenosine-3'-phosphorothioate
  modified_base 2: mod_base = OTHER; note = 2'-O-methylcytidine-3'-phosphorothioate
  modified_base 3: mod_base = OTHER; note = 2'-O-methyluridine-3'-phosphate
  modified_base 4: mod_base = OTHER; note = 2'-O-methyluridine-3'-phosphate
  modified_base 5: mod_base = OTHER; note = 2'-O-methylguanosine-3'-phosphate
  modified_base 6: mod_base = OTHER; note = 2'-O-methylcytidine-3'-phosphate
  modified_base 7: mod_base = OTHER; note = 2'-deoxy-2'-fluorouridine-3'-phosphate
  modified_base 8: mod_base = OTHER; note = 2'-O-methylguanosine-3'-phosphate
  modified_base 9: mod_base = OTHER; note = 2'-deoxy-2'-fluorocytidine-3'-phosphate
  modified_base 10: mod_base = OTHER; note = 2'-deoxy-2'-fluoroadenosine-3'-phosphate
  modified_base 11: mod_base = OTHER; note = 2'-deoxy-2'-fluorouridine-3'-phosphate
  modified_base 12: mod_base = OTHER; note = 2'-O-methyladenosine-3'-phosphate
  modified_base 13: mod_base = OTHER; note = 2'-O-methyluridine-3'-phosphate
  modified_base 14: mod_base = OTHER; note = 2'-O-methylguanosine-3'-phosphate
  modified_base 15: mod_base = OTHER; note = 2'-O-methyluridine-3'-phosphate
  modified_base 16: mod_base = OTHER; note = 2'-O-methylguanosine-3'-phosphate
  modified_base 17: mod_base = OTHER; note = 2'-O-methylguanosine-3'-phosphate
  modified_base 18: mod_base = OTHER; note = 2'-O-methylcytidine-3'-phosphate
  modified_base 19: mod_base = OTHER; note = 2'-O-methyluridine-3'-phosphate
  modified_base 20: mod_base = OTHER; note = 2'-O-methyladenosine-3'-phosphate
  modified_base 21: mod_base = OTHER; note = 2'-O-methyladenosine-3'-phosphate ((2S,4R)-1-[29-[[2-(acetylamino)-2-deoxy-beta-D-galactopyra nosyl]oxy]-14,14-bis[[3-[[3-[[5-[[2-(acetylamino)-2-deoxy-b eta-D-galactopyranosyl]oxy]-1-oxopentyl]amino]propyl]amino] -3-oxopropoxy]methyl]-1,12,19,25-tetraoxo-16-oxa-13,20,24-t riazanonacos-1-yl]-4-hydroxy-2-pyrrolidinyl)methyl ester
acttgctgcatatgtggctaa

SEQ ID NO: 2909 - RNA, 23 nt, synthetic construct
  source 1..23: mol_type = other RNA
  modified_base 1: mod_base = OTHER; note = 2'-O-methyluridine-3'-phosphorothioate
  modified_base 2: mod_base = OTHER; note = 2'-deoxy-2'-fluorouridine-3'-phosphorothioate
  modified_base 3: mod_base = OTHER; note = 2'-O-methyladenosine-3'-phosphate
  modified_base 4: mod_base = OTHER; note = 2'-O-methylguanosine-3'-phosphate
  modified_base 5: mod_base = OTHER; note = 2'-O-methylcytidine-3'-phosphate
  modified_base 6: mod_base = OTHER; note = 2'-deoxy-2'-fluorocytidine-3'-phosphate
  modified_base 7: mod_base = OTHER; note = 2'-O-methyladenosine-3'-phosphate
  modified_base 8: mod_base = OTHER; note = 2'-deoxy-2'-fluorocytidine-3'-phosphate
  modified_base 9: mod_base = OTHER; note = 2'-deoxy-2'-fluoroadenosine-3'-phosphate
  modified_base 10: mod_base = OTHER; note = 2'-O-methyluridine-3'-phosphate
  modified_base 11: mod_base = OTHER; note = 2'-O-methyladenosine-3'-phosphate
  modified_base 12: mod_base = OTHER; note = 2'-O-methyluridine-3'-phosphate
  modified_base 13: mod_base = OTHER; note = 2'-O-methylguanosine-3'-phosphate
  modified_base 14: mod_base = OTHER; note = 2'-deoxy-2'-fluorocytidine-3'-phosphate
  modified_base 15: mod_base = OTHER; note = 2'-O-methyladenosine-3'-phosphate
  modified_base 16: mod_base = OTHER; note = 2'-deoxy-2'-fluoroguanosine-3'-phosphate
  modified_base 17: mod_base = OTHER; note = 2'-O-methylcytidine-3'-phosphate
  modified_base 18: mod_base = OTHER; note = 2'-O-methyladenosine-3'-phosphate
  modified_base 19: mod_base = OTHER; note = 2'-O-methyladenosine-3'-phosphate
  modified_base 20: mod_base = OTHER; note = 2'-O-methylguanosine-3'-phosphate
  modified_base 21: mod_base = OTHER; note = 2'-O-methyluridine-3'-phosphorothioate
  modified_base 22: mod_base = OTHER; note = 2'-O-methylcytidine-3'-phosphorothioate
  modified_base 23: mod_base = OTHER; note = 2'-O-methylcytidine
ttagccacatatgcagcaagtcc

SEQ ID NO: 2910 - RNA, 21 nt, synthetic construct
  source 1..21: mol_type = other RNA
  modified_base 1: mod_base = OTHER; note = 2'-O-methyladenosine-3'-phosphorothioate
  modified_base 2: mod_base = OTHER; note = 2'-O-methylguanosine-3'-phosphorothioate
  modified_base 3: mod_base = OTHER; note = 2'-O-methyluridine-3'-phosphate
  modified_base 4: mod_base = OTHER; note = 2'-O-methylguanosine-3'-phosphate
  modified_base 5: mod_base = OTHER; note = 2'-O-methylguanosine-3'-phosphate
  modified_base 6: mod_base = OTHER; note = 2'-O-methyladenosine-3'-phosphate
  modified_base 7: mod_base = OTHER; note = 2'-deoxy-2'-fluorocytidine-3'-phosphate
  modified_base 8: mod_base = OTHER; note = 2'-O-methyluridine-3'-phosphate
  modified_base 9: mod_base = OTHER; note = 2'-deoxy-2'-fluorouridine-3'-phosphate
  modified_base 10: mod_base = OTHER; note = 2'-deoxy-2'-fluoroguanosine-3'-phosphate
  modified_base 11: mod_base = OTHER; note = 2'-deoxy-2'-fluorocytidine-3'-phosphate
  modified_base 12: mod_base = OTHER; note = 2'-O-methyluridine-3'-phosphate
  modified_base 13: mod_base = OTHER; note = 2'-O-methylguanosine-3'-phosphate
  modified_base 14: mod_base = OTHER; note = 2'-O-methylcytidine-3'-phosphate
  modified_base 15: mod_base = OTHER; note = 2'-O-methyladenosine-3'-phosphate
  modified_base 16: mod_base = OTHER; note = 2'-O-methyluridine-3'-phosphate
  modified_base 17: mod_base = OTHER; note = 2'-O-methyladenosine-3'-phosphate
  modified_base 18: mod_base = OTHER; note = 2'-O-methyluridine-3'-phosphate
  modified_base 19: mod_base = OTHER; note = 2'-O-methylguanosine-3'-phosphate
  modified_base 20: mod_base = OTHER; note = 2'-O-methyluridine-3'-phosphate
  modified_base 21: mod_base = OTHER; note = 2'-O-methylguanosine-3'-phosphate ((2S,4R)-1-[29-[[2-(acetylamino)-2-deoxy-beta-D-galactopyra nosyl]oxy]-14,14-bis[[3-[[3-[[5-[[2-(acetylamino)-2-deoxy-b eta-D-galactopyranosyl]oxy]-1-oxopentyl]amino]propyl]amino] -3-oxopropoxy]methyl]-1,12,19,25-tetraoxo-16-oxa-13,20,24-t riazanonacos-1-yl]-4-hydroxy-2-pyrrolidinyl)methyl ester
agtggacttgctgcatatgtg

SEQ ID NO: 2911 - RNA, 23 nt, synthetic construct
  source 1..23: mol_type = other RNA
  modified_base 1: mod_base = OTHER; note = 2'-O-methylcytidine-3'-phosphorothioate
  modified_base 2: mod_base = OTHER; note = 2'-deoxy-2'-fluoroadenosine-3'-phosphorothioate
  modified_base 3: mod_base = OTHER; note = 2'-O-methylcytidine-3'-phosphate
  modified_base 4: mod_base = OTHER; note = 2'-O-methyladenosine-3'-phosphate
  modified_base 5: mod_base = OTHER; note = 2'-O-methyluridine-3'-phosphate
  modified_base 6: mod_base = OTHER; note = 2'-deoxy-2'-fluoroadenosine-3'-phosphate
  modified_base 7: mod_base = OTHER; note = 2'-O-methyluridine-3'-phosphate
  modified_base 8: mod_base = OTHER; note = 2'-deoxy-2'-fluoroguanosine-3'-phosphate
  modified_base 9: mod_base = OTHER; note = 2'-deoxy-2'-fluorocytidine-3'-phosphate
  modified_base 10: mod_base = OTHER; note = 2'-O-methyladenosine-3'-phosphate
  modified_base 11: mod_base = OTHER; note = 2'-O-methylguanosine-3'-phosphate
  modified_base 12: mod_base = OTHER; note = 2'-O-methylcytidine-3'-phosphate
  modified_base 13: mod_base = OTHER; note = 2'-O-methyladenosine-3'-phosphate
  modified_base 14: mod_base = OTHER; note = 2'-deoxy-2'-fluoroadenosine-3'-phosphate
  modified_base 15: mod_base = OTHER; note = 2'-O-methylguanosine-3'-phosphate
  modified_base 16: mod_base = OTHER; note = 2'-deoxy-2'-fluorouridine-3'-phosphate
  modified_base 17: mod_base = OTHER; note = 2'-O-methylcytidine-3'-phosphate
  modified_base 18: mod_base = OTHER; note = 2'-O-methylcytidine-3'-phosphate
  modified_base 19: mod_base = OTHER; note = 2'-O-methyladenosine-3'-phosphate
  modified_base 20: mod_base = OTHER; note = 2'-O-methylcytidine-3'-phosphate
  modified_base 21: mod_base = OTHER; note = 2'-O-methyluridine-3'-phosphorothioate
  modified_base 22: mod_base = OTHER; note = 2'-O-methylguanosine-3'-phosphorothioate
  modified_base 23: mod_base = OTHER; note = 2'-O-methyluridine
cacatatgcagcaagtccactgt

SEQ ID NO: 2912 - RNA, 21 nt, synthetic construct
  source 1..21: mol_type = other RNA
  modified_base 1: mod_base = OTHER; note = 2'-O-methylcytidine-3'-phosphorothioate
  modified_base 2: mod_base = OTHER; note = 2'-O-methyladenosine-3'-phosphorothioate
  modified_base 3: mod_base = OTHER; note = 2'-O-methylguanosine-3'-phosphate
  modified_base 4: mod_base = OTHER; note = 2'-O-methyluridine-3'-phosphate
  modified_base 5: mod_base = OTHER; note = 2'-O-methylguanosine-3'-phosphate
  modified_base 6: mod_base = OTHER; note = 2'-O-methylguanosine-3'-phosphate
  modified_base 7: mod_base = OTHER; note = 2'-deoxy-2'-fluoroadenosine-3'-phosphate
  modified_base 8: mod_base = OTHER; note = 2'-O-methylcytidine-3'-phosphate
  modified_base 9: mod_base = OTHER; note = 2'-deoxy-2'-fluorouridine-3'-phosphate
  modified_base 10: mod_base = OTHER; note = 2'-deoxy-2'-fluorouridine-3'-phosphate
  modified_base 11: mod_base = OTHER; note = 2'-deoxy-2'-fluoroguanosine-3'-phosphate
  modified_base 12: mod_base = OTHER; note = 2'-O-methylcytidine-3'-phosphate
  modified_base 13: mod_base = OTHER; note = 2'-O-methyluridine-3'-phosphate
  modified_base 14: mod_base = OTHER; note = 2'-O-methylguanosine-3'-phosphate
  modified_base 15: mod_base = OTHER; note = 2'-O-methylcytidine-3'-phosphate
  modified_base 16: mod_base = OTHER; note = 2'-O-methyladenosine-3'-phosphate
  modified_base 17: mod_base = OTHER; note = 2'-O-methyluridine-3'-phosphate
  modified_base 18: mod_base = OTHER; note = 2'-O-methyladenosine-3'-phosphate
  modified_base 19: mod_base = OTHER; note = 2'-O-methyluridine-3'-phosphate
  modified_base 20: mod_base = OTHER; note = 2'-O-methylguanosine-3'-phosphate
  modified_base 21: mod_base = OTHER; note = 2'-O-methyluridine-3'-phosphate ((2S,4R)-1-[29-[[2-(acetylamino)-2-deoxy-beta-D-galactopyra nosyl]oxy]-14,14-bis[[3-[[3-[[5-[[2-(acetylamino)-2-deoxy-b eta-D-galactopyranosyl]oxy]-1-oxopentyl]amino]propyl]amino] -3-oxopropoxy]methyl]-1,12,19,25-tetraoxo-16-oxa-13,20,24-t riazanonacos-1-yl]-4-hydroxy-2-pyrrolidinyl)methyl ester
cagtggacttgctgcatatgt

SEQ ID NO: 2913 - RNA, 23 nt, synthetic construct
  source 1..23: mol_type = other RNA
  modified_base 1: mod_base = OTHER; note = 2'-O-methyladenosine-3'-phosphorothioate
  modified_base 2: mod_base = OTHER; note = 2'-deoxy-2'-fluorocytidine-3'-phosphorothioate
  modified_base 3: mod_base = OTHER; note = 2'-O-methyladenosine-3'-phosphate
  modified_base 4: mod_base = OTHER; note = 2'-O-methyluridine-3'-phosphate
  modified_base 5: mod_base = OTHER; note = 2'-O-methyladenosine-3'-phosphate
  modified_base 6: mod_base = OTHER; note = 2'-deoxy-2'-fluorouridine-3'-phosphate
  modified_base 7: mod_base = OTHER; note = 2'-O-methylguanosine-3'-phosphate
  modified_base 8: mod_base = OTHER; note = 2'-deoxy-2'-fluorocytidine-3'-phosphate
  modified_base 9: mod_base = OTHER; note = 2'-deoxy-2'-fluoroadenosine-3'-phosphate
  modified_base 10: mod_base = OTHER; note = 2'-O-methylguanosine-3'-phosphate
  modified_base 11: mod_base = OTHER; note = 2'-O-methylcytidine-3'-phosphate
  modified_base 12: mod_base = OTHER; note = 2'-O-methyladenosine-3'-phosphate
  modified_base 13: mod_base = OTHER; note = 2'-O-methyladenosine-3'-phosphate
  modified_base 14: mod_base = OTHER; note = 2'-deoxy-2'-fluoroguanosine-3'-phosphate
  modified_base 15: mod_base = OTHER; note = 2'-O-methyluridine-3'-phosphate
  modified_base 16: mod_base = OTHER; note = 2'-deoxy-2'-fluorocytidine-3'-phosphate
  modified_base 17: mod_base = OTHER; note = 2'-O-methylcytidine-3'-phosphate
  modified_base 18: mod_base = OTHER; note = 2'-O-methyladenosine-3'-phosphate
  modified_base 19: mod_base = OTHER; note = 2'-O-methylcytidine-3'-phosphate
  modified_base 20: mod_base = OTHER; note = 2'-O-methyluridine-3'-phosphate
  modified_base 21: mod_base = OTHER; note = 2'-O-methylguanosine-3'-phosphorothioate
  modified_base 22: mod_base = OTHER; note = 2'-O-methyluridine-3'-phosphorothioate
  modified_base 23: mod_base = OTHER; note = 2'-O-methylcytidine
acatatgcagcaagtccactgtc

SEQ ID NO: 2914 - RNA, 21 nt, synthetic construct
  source 1..21: mol_type = other RNA
  modified_base 1: mod_base = OTHER; note = 2'-O-methyluridine-3'-phosphorothioate
  modified_base 2: mod_base = OTHER; note = 2'-O-methyladenosine-3'-phosphorothioate
  modified_base 3: mod_base = OTHER; note = 2'-O-methyladenosine-3'-phosphate
  modified_base 4: mod_base = OTHER; note = 2'-O-methyladenosine-3'-phosphate
  modified_base 5: mod_base = OTHER; note = 2'-O-methyluridine-3'-phosphate
  modified_base 6: mod_base = OTHER; note = 2'-O-methylcytidine-3'-phosphate
  modified_base 7: mod_base = OTHER; note = 2'-deoxy-2'-fluoroadenosine-3'-phosphate
  modified_base 8: mod_base = OTHER; note = 2'-O-methylguanosine-3'-phosphate
  modified_base 9: mod_base = OTHER; note = 2'-deoxy-2'-fluorouridine-3'-phosphate
  modified_base 10: mod_base = OTHER; note = 2'-deoxy-2'-fluoroadenosine-3'-phosphate
  modified_base 11: mod_base = OTHER; note = 2'-deoxy-2'-fluorocytidine-3'-phosphate
  modified_base 12: mod_base = OTHER; note = 2'-O-methyluridine-3'-phosphate
  modified_base 13: mod_base = OTHER; note = 2'-O-methyluridine-3'-phosphate
  modified_base 14: mod_base = OTHER; note = 2'-O-methylcytidine-3'-phosphate
  modified_base 15: mod_base = OTHER; note = 2'-O-methylcytidine-3'-phosphate
  modified_base 16: mod_base = OTHER; note = 2'-O-methyladenosine-3'-phosphate
  modified_base 17: mod_base = OTHER; note = 2'-O-methyladenosine-3'-phosphate
  modified_base 18: mod_base = OTHER; note = 2'-O-methyladenosine-3'-phosphate
  modified_base 19: mod_base = OTHER; note = 2'-O-methylguanosine-3'-phosphate
  modified_base 20: mod_base = OTHER; note = 2'-O-methyluridine-3'-phosphate
  modified_base 21: mod_base = OTHER; note = 2'-O-methylcytidine-3'-phosphate ((2S,4R)-1-[29-[[2-(acetylamino)-2-deoxy-beta-D-galactopyra nosyl]oxy]-14,14-bis[[3-[[3-[[5-[[2-(acetylamino)-2-deoxy-b eta-D-galactopyranosyl]oxy]-1-oxopentyl]amino]propyl]amino] -3-oxopropoxy]methyl]-1,12,19,25-tetraoxo-16-oxa-13,20,24-t riazanonacos-1-yl]-4-hydroxy-2-pyrrolidinyl)methyl ester
taaatcagtacttccaaagtc

SEQ ID NO: 2915 - RNA, 23 nt, synthetic construct
  source 1..23: mol_type = other RNA
  modified_base 1: mod_base = OTHER; note = 2'-O-methylguanosine-3'-phosphorothioate
  modified_base 2: mod_base = OTHER; note = 2'-deoxy-2'-fluoroadenosine-3'-phosphorothioate
  modified_base 3: mod_base = OTHER; note = 2'-O-methylcytidine-3'-phosphate
  modified_base 4: mod_base = OTHER; note = 2'-O-methyluridine-3'-phosphate
  modified_base 5: mod_base = OTHER; note = 2'-O-methyluridine-3'-phosphate
  modified_base 6: mod_base = OTHER; note = 2'-deoxy-2'-fluorouridine-3'-phosphate
  modified_base 7: mod_base = OTHER; note = 2'-O-methylguanosine-3'-phosphate
  modified_base 8: mod_base = OTHER; note = 2'-deoxy-2'-fluoroguanosine-3'-phosphate
  modified_base 9: mod_base = OTHER; note = 2'-deoxy-2'-fluoroadenosine-3'-phosphate
  modified_base 10: mod_base = OTHER; note = 2'-O-methyladenosine-3'-phosphate
  modified_base 11: mod_base = OTHER; note = 2'-O-methylguanosine-3'-phosphate
  modified_base 12: mod_base = OTHER; note = 2'-O-methyluridine-3'-phosphate
  modified_base 13: mod_base = OTHER; note = 2'-O-methyladenosine-3'-phosphate
  modified_base 14: mod_base = OTHER; note = 2'-deoxy-2'-fluorocytidine-3'-phosphate
  modified_base 15: mod_base = OTHER; note = 2'-O-methyluridine-3'-phosphate
  modified_base 16: mod_base = OTHER; note = 2'-deoxy-2'-fluoroguanosine-3'-phosphate
  modified_base 17: mod_base = OTHER; note = 2'-O-methyladenosine-3'-phosphate
  modified_base 18: mod_base = OTHER; note = 2'-O-methyluridine-3'-phosphate
  modified_base 19: mod_base = OTHER; note = 2'-O-methyluridine-3'-phosphate
  modified_base 20: mod_base = OTHER; note = 2'-O-methyluridine-3'-phosphate
  modified_base 21: mod_base = OTHER; note = 2'-O-methyladenosine-3'-phosphorothioate
  modified_base 22: mod_base = OTHER; note = 2'-O-methylguanosine-3'-phosphorothioate
  modified_base 23: mod_base = OTHER; note = 2'-O-methylcytidine
gactttggaagtactgatttagc

SEQ ID NO: 2916 - RNA, 21 nt, synthetic construct
  source 1..21: mol_type = other RNA
  modified_base 1: mod_base = OTHER; note = 2'-O-methyladenosine-3'-phosphorothioate
  modified_base 2: mod_base = OTHER; note = 2'-O-methyladenosine-3'-phosphorothioate
  modified_base 3: mod_base = OTHER; note = 2'-O-methyladenosine-3'-phosphate
  modified_base 4: mod_base = OTHER; note = 2'-O-methyluridine-3'-phosphate
  modified_base 5: mod_base = OTHER; note = 2'-O-methylcytidine-3'-phosphate
  modified_base 6: mod_base = OTHER; note = 2'-O-methyladenosine-3'-phosphate
  modified_base 7: mod_base = OTHER; note = 2'-deoxy-2'-fluoroguanosine-3'-phosphate
  modified_base 8: mod_base = OTHER; note = 2'-O-methyluridine-3'-phosphate
  modified_base 9: mod_base = OTHER; note = 2'-deoxy-2'-fluoroadenosine-3'-phosphate
  modified_base 10: mod_base = OTHER; note = 2'-deoxy-2'-fluorocytidine-3'-phosphate
  modified_base 11: mod_base = OTHER; note = 2'-deoxy-2'-fluorouridine-3'-phosphate
  modified_base 12: mod_base = OTHER; note = 2'-O-methyluridine-3'-phosphate
  modified_base 13: mod_base = OTHER; note = 2'-O-methylcytidine-3'-phosphate
  modified_base 14: mod_base = OTHER; note = 2'-O-methylcytidine-3'-phosphate
  modified_base 15: mod_base = OTHER; note = 2'-O-methyladenosine-3'-phosphate
  modified_base 16: mod_base = OTHER; note = 2'-O-methyladenosine-3'-phosphate
  modified_base 17: mod_base = OTHER; note = 2'-O-methyladenosine-3'-phosphate
  modified_base 18: mod_base = OTHER; note = 2'-O-methylguanosine-3'-phosphate
  modified_base 19: mod_base = OTHER; note = 2'-O-methyluridine-3'-phosphate
  modified_base 20: mod_base = OTHER; note = 2'-O-methylcytidine-3'-phosphate
  modified_base 21: mod_base = OTHER; note = 2'-O-methyluridine-3'-phosphate ((2S,4R)-1-[29-[[2-(acetylamino)-2-deoxy-beta-D-galactopyra nosyl]oxy]-14,14-bis[[3-[[3-[[5-[[2-(acetylamino)-2-deoxy-b eta-D-galactopyranosyl]oxy]-1-oxopentyl]amino]propyl]amino] -3-oxopropoxy]methyl]-1,12,19,25-tetraoxo-16-oxa-13,20,24-t riazanonacos-1-yl]-4-hydroxy-2-pyrrolidinyl)methyl ester
aaatcagtacttccaaagtct

SEQ ID NO: 2917 - RNA, 23 nt, synthetic construct
  source 1..23: mol_type = other RNA
  modified_base 1: mod_base = OTHER; note = 2'-O-methyladenosine-3'-phosphorothioate
  modified_base 2: mod_base = OTHER; note = 2'-deoxy-2'-fluoroguanosine-3'-phosphorothioate
  modified_base 3: mod_base = OTHER; note = 2'-O-methyladenosine-3'-phosphate
  modified_base 4: mod_base = OTHER; note = 2'-O-methylcytidine-3'-phosphate
  modified_base 5: mod_base = OTHER; note = 2'-O-methyluridine-3'-phosphate
  modified_base 6: mod_base = OTHER; note = 2'-deoxy-2'-fluorouridine-3'-phosphate
  modified_base 7: mod_base = OTHER; note = 2'-O-methyluridine-3'-phosphate
  modified_base 8: mod_base = OTHER; note = 2'-deoxy-2'-fluoroguanosine-3'-phosphate
  modified_base 9: mod_base = OTHER; note = 2'-deoxy-2'-fluoroguanosine-3'-phosphate
  modified_base 10: mod_base = OTHER; note = 2'-O-methyladenosine-3'-phosphate
  modified_base 11: mod_base = OTHER; note = 2'-O-methyladenosine-3'-phosphate
  modified_base 12: mod_base = OTHER; note = 2'-O-methylguanosine-3'-phosphate
  modified_base 13: mod_base = OTHER; note = 2'-O-methyluridine-3'-phosphate
  modified_base 14: mod_base = OTHER; note = 2'-deoxy-2'-fluoroadenosine-3'-phosphate
  modified_base 15: mod_base = OTHER; note = 2'-O-methylcytidine-3'-phosphate
  modified_base 16: mod_base = OTHER; note = 2'-deoxy-2'-fluorouridine-3'-phosphate
  modified_base 17: mod_base = OTHER; note = 2'-O-methylguanosine-3'-phosphate
  modified_base 18: mod_base = OTHER; note = 2'-O-methyladenosine-3'-phosphate
  modified_base 19: mod_base = OTHER; note = 2'-O-methyluridine-3'-phosphate
  modified_base 20: mod_base = OTHER; note = 2'-O-methyluridine-3'-phosphate
  modified_base 21: mod_base = OTHER; note = 2'-O-methyluridine-3'-phosphorothioate
  modified_base 22: mod_base = OTHER; note = 2'-O-methyladenosine-3'-phosphorothioate
  modified_base 23: mod_base = OTHER; note = 2'-O-methylguanosine
agactttggaagtactgatttag

SEQ ID NO: 2918 - RNA, 21 nt, synthetic construct
  source 1..21: mol_type = other RNA
  modified_base 1: mod_base = OTHER; note = 2'-O-methyladenosine-3'-phosphorothioate
  modified_base 2: mod_base = OTHER; note = 2'-O-methyluridine-3'-phosphorothioate
  modified_base 3: mod_base = OTHER; note = 2'-O-methylguanosine-3'-phosphate
  modified_base 4: mod_base = OTHER; note = 2'-O-methylcytidine-3'-phosphate
  modified_base 5: mod_base = OTHER; note = 2'-O-methyluridine-3'-phosphate
  modified_base 6: mod_base = OTHER; note = 2'-O-methyladenosine-3'-phosphate
  modified_base 7: mod_base = OTHER; note = 2'-deoxy-2'-fluoroadenosine-3'-phosphate
  modified_base 8: mod_base = OTHER; note = 2'-O-methyladenosine-3'-phosphate
  modified_base 9: mod_base = OTHER; note = 2'-deoxy-2'-fluorouridine-3'-phosphate
  modified_base 10: mod_base = OTHER; note = 2'-deoxy-2'-fluorocytidine-3'-phosphate
  modified_base 11: mod_base = OTHER; note = 2'-deoxy-2'-fluoroadenosine-3'-phosphate
  modified_base 12: mod_base = OTHER; note = 2'-O-methylguanosine-3'-phosphate
  modified_base 13: mod_base = OTHER; note = 2'-O-methyluridine-3'-phosphate
  modified_base 14: mod_base = OTHER; note = 2'-O-methyladenosine-3'-phosphate
  modified_base 15: mod_base = OTHER; note = 2'-O-methylcytidine-3'-phosphate
  modified_base 16: mod_base = OTHER; note = 2'-O-methyluridine-3'-phosphate
  modified_base 17: mod_base = OTHER; note = 2'-O-methyluridine-3'-phosphate
  modified_base 18: mod_base = OTHER; note = 2'-O-methylcytidine-3'-phosphate
  modified_base 19: mod_base = OTHER; note = 2'-O-methylcytidine-3'-phosphate
  modified_base 20: mod_base = OTHER; note = 2'-O-methyladenosine-3'-phosphate
  modified_base 21: mod_base = OTHER; note = 2'-O-methyladenosine-3'-phosphate ((2S,4R)-1-[29-[[2-(acetylamino)-2-deoxy-beta-D-galactopyra nosyl]oxy]-14,14-bis[[3-[[3-[[5-[[2-(acetylamino)-2-deoxy-b eta-D-galactopyranosyl]oxy]-1-oxopentyl]amino]propyl]amino] -3-oxopropoxy]methyl]-1,12,19,25-tetraoxo-16-oxa-13,20,24-t riazanonacos-1-yl]-4-hydroxy-2-pyrrolidinyl)methyl ester
atgctaaatcagtacttccaa

SEQ ID NO: 2919 - RNA, 23 nt, synthetic construct
  source 1..23: mol_type = other RNA
  modified_base 1: mod_base = OTHER; note = 2'-O-methyluridine-3'-phosphorothioate
  modified_base 2: mod_base = OTHER; note = 2'-deoxy-2'-fluorouridine-3'-phosphorothioate
  modified_base 3: mod_base = OTHER; note = 2'-O-methylguanosine-3'-phosphate
  modified_base 4: mod_base = OTHER; note = 2'-O-methylguanosine-3'-phosphate
  modified_base 5: mod_base = OTHER; note = 2'-O-methyladenosine-3'-phosphate
  modified_base 6: mod_base = OTHER; note = 2'-deoxy-2'-fluoroadenosine-3'-phosphate
  modified_base 7: mod_base = OTHER; note = 2'-O-methylguanosine-3'-phosphate
  modified_base 8: mod_base = OTHER; note = 2'-deoxy-2'-fluorouridine-3'-phosphate
  modified_base 9: mod_base = OTHER; note = 2'-deoxy-2'-fluoroadenosine-3'-phosphate
  modified_base 10: mod_base = OTHER; note = 2'-O-methylcytidine-3'-phosphate
  modified_base 11: mod_base = OTHER; note = 2'-O-methyluridine-3'-phosphate
  modified_base 12: mod_base = OTHER; note = 2'-O-methylguanosine-3'-phosphate
  modified_base 13: mod_base = OTHER; note = 2'-O-methyladenosine-3'-phosphate
  modified_base 14: mod_base = OTHER; note = 2'-deoxy-2'-fluorouridine-3'-phosphate
  modified_base 15: mod_base = OTHER; note = 2'-O-methyluridine-3'-phosphate
  modified_base 16: mod_base = OTHER; note = 2'-deoxy-2'-fluorouridine-3'-phosphate
  modified_base 17: mod_base = OTHER; note = 2'-O-methyladenosine-3'-phosphate
  modified_base 18: mod_base = OTHER; note = 2'-O-methylguanosine-3'-phosphate
  modified_base 19: mod_base = OTHER; note = 2'-O-methylcytidine-3'-phosphate
  modified_base 20: mod_base = OTHER; note = 2'-O-methyladenosine-3'-phosphate
  modified_base 21: mod_base = OTHER; note = 2'-O-methyluridine-3'-phosphorothioate
  modified_base 22: mod_base = OTHER; note = 2'-O-methylguanosine-3'-phosphorothioate
  modified_base 23: mod_base = OTHER; note = 2'-O-methyluridine
ttggaagtactgatttagcatgt

SEQ ID NO: 2920 - RNA, 21 nt, synthetic construct
  source 1..21: mol_type = other RNA
  modified_base 1: mod_base = OTHER; note = 2'-O-methylcytidine-3'-phosphorothioate
  modified_base 2: mod_base = OTHER; note = 2'-O-methyladenosine-3'-phosphorothioate
  modified_base 3: mod_base = OTHER; note = 2'-O-methyluridine-3'-phosphate
  modified_base 4: mod_base = OTHER; note = 2'-O-methylguanosine-3'-phosphate
  modified_base 5: mod_base = OTHER; note = 2'-O-methylcytidine-3'-phosphate
  modified_base 6: mod_base = OTHER; note = 2'-O-methyluridine-3'-phosphate
  modified_base 7: mod_base = OTHER; note = 2'-deoxy-2'-fluoroadenosine-3'-phosphate
  modified_base 8: mod_base = OTHER; note = 2'-O-methyladenosine-3'-phosphate
  modified_base 9: mod_base = OTHER; note = 2'-deoxy-2'-fluoroadenosine-3'-phosphate
  modified_base 10: mod_base = OTHER; note = 2'-deoxy-2'-fluorouridine-3'-phosphate
  modified_base 11: mod_base = OTHER; note = 2'-deoxy-2'-fluorocytidine-3'-phosphate
  modified_base 12: mod_base = OTHER; note = 2'-O-methyladenosine-3'-phosphate
  modified_base 13: mod_base = OTHER; note = 2'-O-methylguanosine-3'-phosphate
  modified_base 14: mod_base = OTHER; note = 2'-O-methyluridine-3'-phosphate
  modified_base 15: mod_base = OTHER; note = 2'-O-methyladenosine-3'-phosphate
  modified_base 16: mod_base = OTHER; note = 2'-O-methylcytidine-3'-phosphate
  modified_base 17: mod_base = OTHER; note = 2'-O-methyluridine-3'-phosphate
  modified_base 18: mod_base = OTHER; note = 2'-O-methyluridine-3'-phosphate
  modified_base 19: mod_base = OTHER; note = 2'-O-methylcytidine-3'-phosphate
  modified_base 20: mod_base = OTHER; note = 2'-O-methylcytidine-3'-phosphate
  modified_base 21: mod_base = OTHER; note = 2'-O-methyladenosine-3'-phosphate ((2S,4R)-1-[29-[[2-(acetylamino)-2-deoxy-beta-D-galactopyra nosyl]oxy]-14,14-bis[[3-[[3-[[5-[[2-(acetylamino)-2-deoxy-b eta-D-galactopyranosyl]oxy]-1-oxopentyl]amino]propyl]amino] -3-oxopropoxy]methyl]-1,12,19,25-tetraoxo-16-oxa-13,20,24-t riazanonacos-1-yl]-4-hydroxy-2-pyrrolidinyl)methyl ester
catgctaaatcagtacttcca

SEQ ID NO: 2921 - RNA, 23 nt, synthetic construct
  source 1..23: mol_type = other RNA
  modified_base 1: mod_base = OTHER; note = 2'-O-methyluridine-3'-phosphorothioate
  modified_base 2: mod_base = OTHER; note = 2'-deoxy-2'-fluoroguanosine-3'-phosphorothioate
  modified_base 3: mod_base = OTHER; note = 2'-O-methylguanosine-3'-phosphate
  modified_base 4: mod_base = OTHER; note = 2'-O-methyladenosine-3'-phosphate
  modified_base 5: mod_base = OTHER; note = 2'-O-methyladenosine-3'-phosphate
  modified_base 6: mod_base = OTHER; note = 2'-deoxy-2'-fluoroguanosine-3'-phosphate
  modified_base 7: mod_base = OTHER; note = 2'-O-methyluridine-3'-phosphate
  modified_base 8: mod_base = OTHER; note = 2'-deoxy-2'-fluoroadenosine-3'-phosphate
  modified_base 9: mod_base = OTHER; note = 2'-deoxy-2'-fluorocytidine-3'-phosphate
  modified_base 10: mod_base = OTHER; note = 2'-O-methyluridine-3'-phosphate
  modified_base 11: mod_base = OTHER; note = 2'-O-methylguanosine-3'-phosphate
  modified_base 12: mod_base = OTHER; note = 2'-O-methyladenosine-3'-phosphate
  modified_base 13: mod_base = OTHER; note = 2'-O-methyluridine-3'-phosphate
  modified_base 14: mod_base = OTHER; note = 2'-deoxy-2'-fluorouridine-3'-phosphate
  modified_base 15: mod_base = OTHER; note = 2'-O-methyluridine-3'-phosphate
  modified_base 16: mod_base = OTHER; note = 2'-deoxy-2'-fluoroadenosine-3'-phosphate
  modified_base 17: mod_base = OTHER; note = 2'-O-methylguanosine-3'-phosphate
  modified_base 18: mod_base = OTHER; note = 2'-O-methylcytidine-3'-phosphate
  modified_base 19: mod_base = OTHER; note = 2'-O-methyladenosine-3'-phosphate
  modified_base 20: mod_base = OTHER; note = 2'-O-methyluridine-3'-phosphate
  modified_base 21: mod_base = OTHER; note = 2'-O-methylguanosine-3'-phosphorothioate
  modified_base 22: mod_base = OTHER; note = 2'-O-methyluridine-3'-phosphorothioate
  modified_base 23: mod_base = OTHER; note = 2'-O-methyluridine
tggaagtactgatttagcatgtt

SEQ ID NO: 2922 - RNA, 21 nt, synthetic construct
  source 1..21: mol_type = other RNA
  modified_base 1: mod_base = OTHER; note = 2'-O-methyluridine-3'-phosphorothioate
  modified_base 2: mod_base = OTHER; note = 2'-O-methylcytidine-3'-phosphorothioate
  modified_base 3: mod_base = OTHER; note = 2'-O-methylcytidine-3'-phosphate
  modified_base 4: mod_base = OTHER; note = 2'-O-methyluridine-3'-phosphate
  modified_base 5: mod_base = OTHER; note = 2'-O-methylcytidine-3'-phosphate
  modified_base 6: mod_base = OTHER; note = 2'-O-methyladenosine-3'-phosphate
  modified_base 7: mod_base = OTHER; note = 2'-deoxy-2'-fluoroadenosine-3'-phosphate
  modified_base 8: mod_base = OTHER; note = 2'-O-methyluridine-3'-phosphate
  modified_base 9: mod_base = OTHER; note = 2'-deoxy-2'-fluorouridine-3'-phosphate
  modified_base 10: mod_base = OTHER; note = 2'-deoxy-2'-fluoroguanosine-3'-phosphate
  modified_base 11: mod_base = OTHER; note = 2'-deoxy-2'-fluoroadenosine-3'-phosphate
  modified_base 12: mod_base = OTHER; note = 2'-O-methyladenosine-3'-phosphate
  modified_base 13: mod_base = OTHER; note = 2'-O-methylguanosine-3'-phosphate
  modified_base 14: mod_base = OTHER; note = 2'-O-methyladenosine-3'-phosphate
  modified_base 15: mod_base = OTHER; note = 2'-O-methyladenosine-3'-phosphate
  modified_base 16: mod_base = OTHER; note = 2'-O-methylguanosine-3'-phosphate
  modified_base 17: mod_base = OTHER; note = 2'-O-methyluridine-3'-phosphate
  modified_base 18: mod_base = OTHER; note = 2'-O-methylguanosine-3'-phosphate
  modified_base 19: mod_base = OTHER; note = 2'-O-methylguanosine-3'-phosphate
  modified_base 20: mod_base = OTHER; note = 2'-O-methylcytidine-3'-phosphate
  modified_base 21: mod_base = OTHER; note = 2'-O-methylguanosine-3'-phosphate ((2S,4R)-1-[29-[[2-(acetylamino)-2-deoxy-beta-D-galactopyra nosyl]oxy]-14,14-bis[[3-[[3-[[5-[[2-(acetylamino)-2-deoxy-b eta-D-galactopyranosyl]oxy]-1-oxopentyl]amino]propyl]amino] -3-oxopropoxy]methyl]-1,12,19,25-tetraoxo-16-oxa-13,20,24-t riazanonacos-1-yl]-4-hydroxy-2-pyrrolidinyl)methyl ester
tcctcaattgaagaagtggcg

SEQ ID NO: 2923 - RNA, 23 nt, synthetic construct
  source 1..23: mol_type = other RNA
  modified_base 1: mod_base = OTHER; note = 2'-O-methylcytidine-3'-phosphorothioate
  modified_base 2: mod_base = OTHER; note = 2'-deoxy-2'-fluoroguanosine-3'-phosphorothioate
  modified_base 3: mod_base = OTHER; note = 2'-O-methylcytidine-3'-phosphate
  modified_base 4: mod_base = OTHER; note = 2'-O-methylcytidine-3'-phosphate
  modified_base 5: mod_base = OTHER; note = 2'-O-methyladenosine-3'-phosphate
  modified_base 6: mod_base = OTHER; note = 2'-deoxy-2'-fluorocytidine-3'-phosphate
  modified_base 7: mod_base = OTHER; note = 2'-O-methyluridine-3'-phosphate
  modified_base 8: mod_base = OTHER; note = 2'-deoxy-2'-fluorouridine-3'-phosphate
  modified_base 9: mod_base = OTHER; note = 2'-deoxy-2'-fluorocytidine-3'-phosphate
  modified_base 10: mod_base = OTHER; note = 2'-O-methyluridine-3'-phosphate
  modified_base 11: mod_base = OTHER; note = 2'-O-methyluridine-3'-phosphate
  modified_base 12: mod_base = OTHER; note = 2'-O-methylcytidine-3'-phosphate
  modified_base 13: mod_base = OTHER; note = 2'-O-methyladenosine-3'-phosphate
  modified_base 14: mod_base = OTHER; note = 2'-deoxy-2'-fluoroadenosine-3'-phosphate
  modified_base 15: mod_base = OTHER; note = 2'-O-methyluridine-3'-phosphate
  modified_base 16: mod_base = OTHER; note = 2'-deoxy-2'-fluorouridine-3'-phosphate
  modified_base 17: mod_base = OTHER; note = 2'-O-methylguanosine-3'-phosphate
  modified_base 18: mod_base = OTHER; note = 2'-O-methyladenosine-3'-phosphate
  modified_base 19: mod_base = OTHER; note = 2'-O-methylguanosine-3'-phosphate
  modified_base 20: mod_base = OTHER; note = 2'-O-methylguanosine-3'-phosphate
  modified_base 21: mod_base = OTHER; note = 2'-O-methyladenosine-3'-phosphorothioate
  modified_base 22: mod_base = OTHER; note = 2'-O-methylguanosine-3'-phosphorothioate
  modified_base 23: mod_base = OTHER; note = 2'-O-methylguanosine
cgccacttcttcaattgaggagg

SEQ ID NO: 2924 - RNA, 21 nt, synthetic construct
  source 1..21: mol_type = other RNA
  modified_base 1: mod_base = OTHER; note = 2'-O-methylcytidine-3'-phosphorothioate
  modified_base 2: mod_base = OTHER; note = 2'-O-methylcytidine-3'-phosphorothioate
  modified_base 3: mod_base = OTHER; note = 2'-O-methyluridine-3'-phosphate
  modified_base 4: mod_base = OTHER; note = 2'-O-methylcytidine-3'-phosphate
  modified_base 5: mod_base = OTHER; note = 2'-O-methyladenosine-3'-phosphate
  modified_base 6: mod_base = OTHER; note = 2'-O-methyladenosine-3'-phosphate
  modified_base 7: mod_base = OTHER; note = 2'-deoxy-2'-fluorouridine-3'-phosphate
  modified_base 8: mod_base = OTHER; note = 2'-O-methyluridine-3'-phosphate
  modified_base 9: mod_base = OTHER; note = 2'-deoxy-2'-fluoroguanosine-3'-phosphate
  modified_base 10: mod_base = OTHER; note = 2'-deoxy-2'-fluoroadenosine-3'-phosphate
  modified_base 11: mod_base = OTHER; note = 2'-deoxy-2'-fluoroadenosine-3'-phosphate
  modified_base 12: mod_base = OTHER; note = 2'-O-methylguanosine-3'-phosphate
  modified_base 13: mod_base = OTHER; note = 2'-O-methyladenosine-3'-phosphate
  modified_base 14: mod_base = OTHER; note = 2'-O-methyladenosine-3'-phosphate
  modified_base 15: mod_base = OTHER; note = 2'-O-methylguanosine-3'-phosphate
  modified_base 16: mod_base = OTHER; note = 2'-O-methyluridine-3'-phosphate
  modified_base 17: mod_base = OTHER; note = 2'-O-methylguanosine-3'-phosphate
  modified_base 18: mod_base = OTHER; note = 2'-O-methylguanosine-3'-phosphate
  modified_base 19: mod_base = OTHER; note = 2'-O-methylcytidine-3'-phosphate
  modified_base 20: mod_base = OTHER; note = 2'-O-methylguanosine-3'-phosphate
  modified_base 21: mod_base = OTHER; note = 2'-O-methylguanosine-3'-phosphate ((2S,4R)-1-[29-[[2-(acetylamino)-2-deoxy-beta-D-galactopyra nosyl]oxy]-14,14-bis[[3-[[3-[[5-[[2-(acetylamino)-2-deoxy-b eta-D-galactopyranosyl]oxy]-1-oxopentyl]amino]propyl]amino] -3-oxopropoxy]methyl]-1,12,19,25-tetraoxo-16-oxa-13,20,24-t riazanonacos-1-yl]-4-hydroxy-2-pyrrolidinyl)methyl ester
cctcaattgaagaagtggcgg

SEQ ID NO: 2925 - RNA, 23 nt, synthetic construct
  source 1..23: mol_type = other RNA
  modified_base 1: mod_base = OTHER; note = 2'-O-methylcytidine-3'-phosphorothioate
  modified_base 2: mod_base = OTHER; note = 2'-deoxy-2'-fluorocytidine-3'-phosphorothioate
  modified_base 3: mod_base = OTHER; note = 2'-O-methylguanosine-3'-phosphate
  modified_base 4: mod_base = OTHER; note = 2'-O-methylcytidine-3'-phosphate
  modified_base 5: mod_base = OTHER; note = 2'-O-methylcytidine-3'-phosphate
  modified_base 6: mod_base = OTHER; note = 2'-deoxy-2'-fluoroadenosine-3'-phosphate
  modified_base 7: mod_base = OTHER; note = 2'-O-methylcytidine-3'-phosphate
  modified_base 8: mod_base = OTHER; note = 2'-deoxy-2'-fluorouridine-3'-phosphate
  modified_base 9: mod_base = OTHER; note = 2'-deoxy-2'-fluorouridine-3'-phosphate
  modified_base 10: mod_base = OTHER; note = 2'-O-methylcytidine-3'-phosphate
  modified_base 11: mod_base = OTHER; note = 2'-O-methyluridine-3'-phosphate
  modified_base 12: mod_base = OTHER; note = 2'-O-methyluridine-3'-phosphate
  modified_base 13: mod_base = OTHER; note = 2'-O-methylcytidine-3'-phosphate
  modified_base 14: mod_base = OTHER; note = 2'-deoxy-2'-fluoroadenosine-3'-phosphate
  modified_base 15: mod_base = OTHER; note = 2'-O-methyladenosine-3'-phosphate
  modified_base 16: mod_base = OTHER; note = 2'-deoxy-2'-fluorouridine-3'-phosphate
  modified_base 17: mod_base = OTHER; note = 2'-O-methyluridine-3'-phosphate
  modified_base 18: mod_base = OTHER; note = 2'-O-methylguanosine-3'-phosphate
  modified_base 19: mod_base = OTHER; note = 2'-O-methyladenosine-3'-phosphate
  modified_base 20: mod_base = OTHER; note = 2'-O-methylguanosine-3'-phosphate
  modified_base 21: mod_base = OTHER; note = 2'-O-methylguanosine-3'-phosphorothioate
  modified_base 22: mod_base = OTHER; note = 2'-O-methyladenosine-3'-phosphorothioate
  modified_base 23: mod_base = OTHER; note = 2'-O-methylguanosine
ccgccacttcttcaattgaggag

SEQ ID NO: 2926 - RNA, 21 nt, synthetic construct
  source 1..21: mol_type = other RNA
  modified_base 1: mod_base = OTHER; note = 2'-O-methylcytidine-3'-phosphorothioate
  modified_base 2: mod_base = OTHER; note = 2'-O-methyladenosine-3'-phosphorothioate
  modified_base 3: mod_base = OTHER; note = 2'-O-methylcytidine-3'-phosphate
  modified_base 4: mod_base = OTHER; note = 2'-O-methylcytidine-3'-phosphate
  modified_base 5: mod_base = OTHER; note = 2'-O-methyluridine-3'-phosphate
  modified_base 6: mod_base = OTHER; note = 2'-O-methylcytidine-3'-phosphate
  modified_base 7: mod_base = OTHER; note = 2'-deoxy-2'-fluorocytidine-3'-phosphate
  modified_base 8: mod_base = OTHER; note = 2'-O-methyluridine-3'-phosphate
  modified_base 9: mod_base = OTHER; note = 2'-deoxy-2'-fluorocytidine-3'-phosphate
  modified_base 10: mod_base = OTHER; note = 2'-deoxy-2'-fluoroadenosine-3'-phosphate
  modified_base 11: mod_base = OTHER; note = 2'-deoxy-2'-fluoroadenosine-3'-phosphate
  modified_base 12: mod_base = OTHER; note = 2'-O-methyluridine-3'-phosphate
  modified_base 13: mod_base = OTHER; note = 2'-O-methyluridine-3'-phosphate
  modified_base 14: mod_base = OTHER; note = 2'-O-methylguanosine-3'-phosphate
  modified_base 15: mod_base = OTHER; note = 2'-O-methyladenosine-3'-phosphate
  modified_base 16: mod_base = OTHER; note = 2'-O-methyladenosine-3'-phosphate
  modified_base 17: mod_base = OTHER; note = 2'-O-methylguanosine-3'-phosphate
  modified_base 18: mod_base = OTHER; note = 2'-O-methyladenosine-3'-phosphate
  modified_base 19: mod_base = OTHER; note = 2'-O-methyladenosine-3'-phosphate
  modified_base 20: mod_base = OTHER; note = 2'-O-methylguanosine-3'-phosphate
  modified_base 21: mod_base = OTHER; note = 2'-O-methyluridine-3'-phosphate ((2S,4R)-1-[29-[[2-(acetylamino)-2-deoxy-beta-D-galactopyra nosyl]oxy]-14,14-bis[[3-[[3-[[5-[[2-(acetylamino)-2-deoxy-b eta-D-galactopyranosyl]oxy]-1-oxopentyl]amino]propyl]amino] -3-oxopropoxy]methyl]-1,12,19,25-tetraoxo-16-oxa-13,20,24-t riazanonacos-1-yl]-4-hydroxy-2-pyrrolidinyl)methyl ester
cacctcctcaattgaagaagt

SEQ ID NO: 2927 - RNA, 23 nt, synthetic construct
  source 1..23: mol_type = other RNA
  modified_base 1: mod_base = OTHER; note = 2'-O-methyladenosine-3'-phosphorothioate
  modified_base 2: mod_base = OTHER; note = 2'-deoxy-2'-fluorocytidine-3'-phosphorothioate
  modified_base 3: mod_base = OTHER; note = 2'-O-methyluridine-3'-phosphate
  modified_base 4: mod_base = OTHER; note = 2'-O-methyluridine-3'-phosphate
  modified_base 5: mod_base = OTHER; note = 2'-O-methylcytidine-3'-phosphate
  modified_base 6: mod_base = OTHER; note = 2'-deoxy-2'-fluorouridine-3'-phosphate
  modified_base 7: mod_base = OTHER; note = 2'-O-methyluridine-3'-phosphate
  modified_base 8: mod_base = OTHER; note = 2'-deoxy-2'-fluorocytidine-3'-phosphate
  modified_base 9: mod_base = OTHER; note = 2'-deoxy-2'-fluoroadenosine-3'-phosphate
  modified_base 10: mod_base = OTHER; note = 2'-O-methyladenosine-3'-phosphate
  modified_base 11: mod_base = OTHER; note = 2'-O-methyluridine-3'-phosphate
  modified_base 12: mod_base = OTHER; note = 2'-O-methyluridine-3'-phosphate
  modified_base 13: mod_base = OTHER; note = 2'-O-methylguanosine-3'-phosphate
  modified_base 14: mod_base = OTHER; note = 2'-deoxy-2'-fluoroadenosine-3'-phosphate
  modified_base 15: mod_base = OTHER; note = 2'-O-methylguanosine-3'-phosphate
  modified_base 16: mod_base = OTHER; note = 2'-deoxy-2'-fluoroguanosine-3'-phosphate
  modified_base 17: mod_base = OTHER; note = 2'-O-methyladenosine-3'-phosphate
  modified_base 18: mod_base = OTHER; note = 2'-O-methylguanosine-3'-phosphate
  modified_base 19: mod_base = OTHER; note = 2'-O-methylguanosine-3'-phosphate
  modified_base 20: mod_base = OTHER; note = 2'-O-methyluridine-3'-phosphate
  modified_base 21: mod_base = OTHER; note = 2'-O-methylguanosine-3'-phosphorothioate
  modified_base 22: mod_base = OTHER; note = 2'-O-methylguanosine-3'-phosphorothioate
  modified_base 23: mod_base = OTHER; note = 2'-O-methylcytidine
acttcttcaattgaggaggtggc

SEQ ID NO: 2928 - RNA, 21 nt, synthetic construct
  source 1..21: mol_type = other RNA
  modified_base 1: mod_base = OTHER; note = 2'-O-methylcytidine-3'-phosphorothioate
  modified_base 2: mod_base = OTHER; note = 2'-O-methylcytidine-3'-phosphorothioate
  modified_base 3: mod_base = OTHER; note = 2'-O-methyladenosine-3'-phosphate
  modified_base 4: mod_base = OTHER; note = 2'-O-methylcytidine-3'-phosphate
  modified_base 5: mod_base = OTHER; note = 2'-O-methylcytidine-3'-phosphate
  modified_base 6: mod_base = OTHER; note = 2'-O-methyluridine-3'-phosphate
  modified_base 7: mod_base = OTHER; note = 2'-deoxy-2'-fluorocytidine-3'-phosphate
  modified_base 8: mod_base = OTHER; note = 2'-O-methylcytidine-3'-phosphate
  modified_base 9: mod_base = OTHER; note = 2'-deoxy-2'-fluorouridine-3'-phosphate
  modified_base 10: mod_base = OTHER; note = 2'-deoxy-2'-fluorocytidine-3'-phosphate
  modified_base 11: mod_base = OTHER; note = 2'-deoxy-2'-fluoroadenosine-3'-phosphate
  modified_base 12: mod_base = OTHER; note = 2'-O-methyladenosine-3'-phosphate
  modified_base 13: mod_base = OTHER; note = 2'-O-methyluridine-3'-phosphate
  modified_base 14: mod_base = OTHER; note = 2'-O-methyluridine-3'-phosphate
  modified_base 15: mod_base = OTHER; note = 2'-O-methylguanosine-3'-phosphate
  modified_base 16: mod_base = OTHER; note = 2'-O-methyladenosine-3'-phosphate
  modified_base 17: mod_base = OTHER; note = 2'-O-methyladenosine-3'-phosphate
  modified_base 18: mod_base = OTHER; note = 2'-O-methylguanosine-3'-phosphate
  modified_base 19: mod_base = OTHER; note = 2'-O-methyladenosine-3'-phosphate
  modified_base 20: mod_base = OTHER; note = 2'-O-methyladenosine-3'-phosphate
  modified_base 21: mod_base = OTHER; note = 2'-O-methylguanosine-3'-phosphate ((2S,4R)-1-[29-[[2-(acetylamino)-2-deoxy-beta-D-galactopyra nosyl]oxy]-14,14-bis[[3-[[3-[[5-[[2-(acetylamino)-2-deoxy-b eta-D-galactopyranosyl]oxy]-1-oxopentyl]amino]propyl]amino] -3-oxopropoxy]methyl]-1,12,19,25-tetraoxo-16-oxa-13,20,24-t riazanonacos-1-yl]-4-hydroxy-2-pyrrolidinyl)methyl ester
ccacctcctcaattgaagaag

SEQ ID NO: 2929 - RNA, 23 nt, synthetic construct
  source 1..23: mol_type = other RNA
  modified_base 1: mod_base = OTHER; note = 2'-O-methylcytidine-3'-phosphorothioate
  modified_base 2: mod_base = OTHER; note = 2'-deoxy-2'-fluorouridine-3'-phosphorothioate
  modified_base 3: mod_base = OTHER; note = 2'-O-methyluridine-3'-phosphate
  modified_base 4: mod_base = OTHER; note = 2'-O-methylcytidine-3'-phosphate
  modified_base 5: mod_base = OTHER; note = 2'-O-methyluridine-3'-phosphate
  modified_base 6: mod_base = OTHER; note = 2'-deoxy-2'-fluorouridine-3'-phosphate
  modified_base 7: mod_base = OTHER; note = 2'-O-methylcytidine-3'-phosphate
  modified_base 8: mod_base = OTHER; note = 2'-deoxy-2'-fluoroadenosine-3'-phosphate
  modified_base 9: mod_base = OTHER; note = 2'-deoxy-2'-fluoroadenosine-3'-phosphate
  modified_base 10: mod_base = OTHER; note = 2'-O-methyluridine-3'-phosphate
  modified_base 11: mod_base = OTHER; note = 2'-O-methyluridine-3'-phosphate
  modified_base 12: mod_base = OTHER; note = 2'-O-methylguanosine-3'-phosphate
  modified_base 13: mod_base = OTHER; note = 2'-O-methyladenosine-3'-phosphate
  modified_base 14: mod_base = OTHER; note = 2'-deoxy-2'-fluoroguanosine-3'-phosphate
  modified_base 15: mod_base = OTHER; note = 2'-O-methylguanosine-3'-phosphate
  modified_base 16: mod_base = OTHER; note = 2'-deoxy-2'-fluoroadenosine-3'-phosphate
  modified_base 17: mod_base = OTHER; note = 2'-O-methylguanosine-3'-phosphate
  modified_base 18: mod_base = OTHER; note = 2'-O-methylguanosine-3'-phosphate
  modified_base 19: mod_base = OTHER; note = 2'-O-methyluridine-3'-phosphate
  modified_base 20: mod_base = OTHER; note = 2'-O-methylguanosine-3'-phosphate
  modified_base 21: mod_base = OTHER; note = 2'-O-methylguanosine-3'-phosphorothioate
  modified_base 22: mod_base = OTHER; note = 2'-O-methylcytidine-3'-phosphorothioate
  modified_base 23: mod_base = OTHER; note = 2'-O-methylcytidine
cttcttcaattgaggaggtggcc

SEQ ID NO: 2930 - RNA, 21 nt, synthetic construct
  source 1..21: mol_type = other RNA
  modified_base 1: mod_base = OTHER; note = 2'-O-methylcytidine-3'-phosphorothioate
  modified_base 2: mod_base = OTHER; note = 2'-O-methyladenosine-3'-phosphorothioate
  modified_base 3: mod_base = OTHER; note = 2'-O-methyladenosine-3'-phosphate
  modified_base 4: mod_base = OTHER; note = 2'-O-methylguanosine-3'-phosphate
  modified_base 5: mod_base = OTHER; note = 2'-O-methyladenosine-3'-phosphate
  modified_base 6: mod_base = OTHER; note = 2'-O-methyluridine-3'-phosphate
  modified_base 7: mod_base = OTHER; note = 2'-deoxy-2'-fluoroguanosine-3'-phosphate
  modified_base 8: mod_base = OTHER; note = 2'-O-methyluridine-3'-phosphate
  modified_base 9: mod_base = OTHER; note = 2'-deoxy-2'-fluorocytidine-3'-phosphate
  modified_base 10: mod_base = OTHER; note = 2'-deoxy-2'-fluorocytidine-3'-phosphate
  modified_base 11: mod_base = OTHER; note = 2'-deoxy-2'-fluorouridine-3'-phosphate
  modified_base 12: mod_base = OTHER; note = 2'-O-methylcytidine-3'-phosphate
  modified_base 13: mod_base = OTHER; note = 2'-O-methylguanosine-3'-phosphate
  modified_base 14: mod_base = OTHER; note = 2'-O-methyladenosine-3'-phosphate
  modified_base 15: mod_base = OTHER; note = 2'-O-methylguanosine-3'-phosphate
  modified_base 16: mod_base = OTHER; note = 2'-O-methyladenosine-3'-phosphate
  modified_base 17: mod_base = OTHER; note = 2'-O-methyluridine-3'-phosphate
  modified_base 18: mod_base = OTHER; note = 2'-O-methyladenosine-3'-phosphate
  modified_base 19: mod_base = OTHER; note = 2'-O-methylcytidine-3'-phosphate
  modified_base 20: mod_base = OTHER; note = 2'-O-methyluridine-3'-phosphate
  modified_base 21: mod_base = OTHER; note = 2'-O-methyladenosine-3'-phosphate ((2S,4R)-1-[29-[[2-(acetylamino)-2-deoxy-beta-D-galactopyra nosyl]oxy]-14,14-bis[[3-[[3-[[5-[[2-(acetylamino)-2-deoxy-b eta-D-galactopyranosyl]oxy]-1-oxopentyl]amino]propyl]amino] -3-oxopropoxy]methyl]-1,12,19,25-tetraoxo-16-oxa-13,20,24-t riazanonacos-1-yl]-4-hydroxy-2-pyrrolidinyl)methyl ester
caagatgtcctcgagatacta

SEQ ID NO: 2931 - RNA, 23 nt, synthetic construct
  source 1..23: mol_type = other RNA
  modified_base 1: mod_base = OTHER; note = 2'-O-methyluridine-3'-phosphorothioate
  modified_base 2: mod_base = OTHER; note = 2'-deoxy-2'-fluoroadenosine-3'-phosphorothioate
  modified_base 3: mod_base = OTHER; note = 2'-O-methylguanosine-3'-phosphate
  modified_base 4: mod_base = OTHER; note = 2'-O-methyluridine-3'-phosphate
  modified_base 5: mod_base = OTHER; note = 2'-O-methyladenosine-3'-phosphate
  modified_base 6: mod_base = OTHER; note = 2'-deoxy-2'-fluorouridine-3'-phosphate
  modified_base 7: mod_base = OTHER; note = 2'-O-methylcytidine-3'-phosphate
  modified_base 8: mod_base = OTHER; note = 2'-deoxy-2'-fluorouridine-3'-phosphate
  modified_base 9: mod_base = OTHER; note = 2'-deoxy-2'-fluorocytidine-3'-phosphate
  modified_base 10: mod_base = OTHER; note = 2'-O-methylguanosine-3'-phosphate
  modified_base 11: mod_base = OTHER; note = 2'-O-methyladenosine-3'-phosphate
  modified_base 12: mod_base = OTHER; note = 2'-O-methylguanosine-3'-phosphate
  modified_base 13: mod_base = OTHER; note = 2'-O-methylguanosine-3'-phosphate
  modified_base 14: mod_base = OTHER; note = 2'-deoxy-2'-fluoroadenosine-3'-phosphate
  modified_base 15: mod_base = OTHER; note = 2'-O-methylcytidine-3'-phosphate
  modified_base 16: mod_base = OTHER; note = 2'-deoxy-2'-fluoroadenosine-3'-phosphate
  modified_base 17: mod_base = OTHER; note = 2'-O-methyluridine-3'-phosphate
  modified_base 18: mod_base = OTHER; note = 2'-O-methylcytidine-3'-phosphate
  modified_base 19: mod_base = OTHER; note = 2'-O-methyluridine-3'-phosphate
  modified_base 20: mod_base = OTHER; note = 2'-O-methyluridine-3'-phosphate
  modified_base 21: mod_base = OTHER; note = 2'-O-methylguanosine-3'-phosphorothioate
  modified_base 22: mod_base = OTHER; note = 2'-O-methyladenosine-3'-phosphorothioate
  modified_base 23: mod_base = OTHER; note = 2'-O-methyladenosine
tagtatctcgaggacatcttgaa

SEQ ID NO: 2932 - RNA, 21 nt, synthetic construct
  source 1..21: mol_type = other RNA
  modified_base 1: mod_base = OTHER; note = 2'-O-methyladenosine-3'-phosphorothioate
  modified_base 2: mod_base = OTHER; note = 2'-O-methyladenosine-3'-phosphorothioate
  modified_base 3: mod_base = OTHER; note = 2'-O-methylguanosine-3'-phosphate
  modified_base 4: mod_base = OTHER; note = 2'-O-methyladenosine-3'-phosphate
  modified_base 5: mod_base = OTHER; note = 2'-O-methyluridine-3'-phosphate
  modified_base 6: mod_base = OTHER; note = 2'-O-methylguanosine-3'-phosphate
  modified_base 7: mod_base = OTHER; note = 2'-deoxy-2'-fluorouridine-3'-phosphate
  modified_base 8: mod_base = OTHER; note = 2'-O-methylcytidine-3'-phosphate
  modified_base 9: mod_base = OTHER; note = 2'-deoxy-2'-fluorocytidine-3'-phosphate
  modified_base 10: mod_base = OTHER; note = 2'-deoxy-2'-fluorouridine-3'-phosphate
  modified_base 11: mod_base = OTHER; note = 2'-deoxy-2'-fluorocytidine-3'-phosphate
  modified_base 12: mod_base = OTHER; note = 2'-O-methylguanosine-3'-phosphate
  modified_base 13: mod_base = OTHER; note = 2'-O-methyladenosine-3'-phosphate
  modified_base 14: mod_base = OTHER; note = 2'-O-methylguanosine-3'-phosphate
  modified_base 15: mod_base = OTHER; note = 2'-O-methyladenosine-3'-phosphate
  modified_base 16: mod_base = OTHER; note = 2'-O-methyluridine-3'-phosphate
  modified_base 17: mod_base = OTHER; note = 2'-O-methyladenosine-3'-phosphate
  modified_base 18: mod_base = OTHER; note = 2'-O-methylcytidine-3'-phosphate
  modified_base 19: mod_base = OTHER; note = 2'-O-methyluridine-3'-phosphate
  modified_base 20: mod_base = OTHER; note = 2'-O-methyladenosine-3'-phosphate
  modified_base 21: mod_base = OTHER; note = 2'-O-methyladenosine-3'-phosphate ((2S,4R)-1-[29-[[2-(acetylamino)-2-deoxy-beta-D-galactopyra nosyl]oxy]-14,14-bis[[3-[[3-[[5-[[2-(acetylamino)-2-deoxy-b eta-D-galactopyranosyl]oxy]-1-oxopentyl]amino]propyl]amino] -3-oxopropoxy]methyl]-1,12,19,25-tetraoxo-16-oxa-13,20,24-t riazanonacos-1-yl]-4-hydroxy-2-pyrrolidinyl)methyl ester
aagatgtcctcgagatactaa

SEQ ID NO: 2933 - RNA, 23 nt, synthetic construct
  source 1..23: mol_type = other RNA
  modified_base 1: mod_base = OTHER; note = 2'-O-methyluridine-3'-phosphorothioate
  modified_base 2: mod_base = OTHER; note = 2'-deoxy-2'-fluorouridine-3'-phosphorothioate
  modified_base 3: mod_base = OTHER; note = 2'-O-methyladenosine-3'-phosphate
  modified_base 4: mod_base = OTHER; note = 2'-O-methylguanosine-3'-phosphate
  modified_base 5: mod_base = OTHER; note = 2'-O-methyluridine-3'-phosphate
  modified_base 6: mod_base = OTHER; note = 2'-deoxy-2'-fluoroadenosine-3'-phosphate
  modified_base 7: mod_base = OTHER; note = 2'-O-methyluridine-3'-phosphate
  modified_base 8: mod_base = OTHER; note = 2'-deoxy-2'-fluorocytidine-3'-phosphate
  modified_base 9: mod_base = OTHER; note = 2'-deoxy-2'-fluorouridine-3'-phosphate
  modified_base 10: mod_base = OTHER; note = 2'-O-methylcytidine-3'-phosphate
  modified_base 11: mod_base = OTHER; note = 2'-O-methylguanosine-3'-phosphate
  modified_base 12: mod_base = OTHER; note = 2'-O-methyladenosine-3'-phosphate
  modified_base 13: mod_base = OTHER; note = 2'-O-methylguanosine-3'-phosphate
  modified_base 14: mod_base = OTHER; note = 2'-deoxy-2'-fluoroguanosine-3'-phosphate
  modified_base 15: mod_base = OTHER; note = 2'-O-methyladenosine-3'-phosphate
  modified_base 16: mod_base = OTHER; note = 2'-deoxy-2'-fluorocytidine-3'-phosphate
  modified_base 17: mod_base = OTHER; note = 2'-O-methyladenosine-3'-phosphate
  modified_base 18: mod_base = OTHER; note = 2'-O-methyluridine-3'-phosphate
  modified_base 19: mod_base = OTHER; note = 2'-O-methylcytidine-3'-phosphate
  modified_base 20: mod_base = OTHER; note = 2'-O-methyluridine-3'-phosphate
  modified_base 21: mod_base = OTHER; note = 2'-O-methyluridine-3'-phosphorothioate
  modified_base 22: mod_base = OTHER; note = 2'-O-methylguanosine-3'-phosphorothioate
  modified_base 23: mod_base = OTHER; note = 2'-O-methyladenosine
ttagtatctcgaggacatcttga

SEQ ID NO: 2934 - RNA, 21 nt, synthetic construct
  source 1..21: mol_type = other RNA
  modified_base 1: mod_base = OTHER; note = 2'-O-methyluridine-3'-phosphorothioate
  modified_base 2: mod_base = OTHER; note = 2'-O-methylguanosine-3'-phosphorothioate
  modified_base 3: mod_base = OTHER; note = 2'-O-methyluridine-3'-phosphate
  modified_base 4: mod_base = OTHER; note = 2'-O-methyluridine-3'-phosphate
  modified_base 5: mod_base = OTHER; note = 2'-O-methylcytidine-3'-phosphate
  modified_base 6: mod_base = OTHER; note = 2'-O-methyladenosine-3'-phosphate
  modified_base 7: mod_base = OTHER; note = 2'-deoxy-2'-fluoroadenosine-3'-phosphate
  modified_base 8: mod_base = OTHER; note = 2'-O-methylguanosine-3'-phosphate
  modified_base 9: mod_base = OTHER; note = 2'-deoxy-2'-fluoroadenosine-3'-phosphate
  modified_base 10: mod_base = OTHER; note = 2'-deoxy-2'-fluorouridine-3'-phosphate
  modified_base 11: mod_base = OTHER; note = 2'-deoxy-2'-fluoroguanosine-3'-phosphate
  modified_base 12: mod_base = OTHER; note = 2'-O-methyluridine-3'-phosphate
  modified_base 13: mod_base = OTHER; note = 2'-O-methylcytidine-3'-phosphate
  modified_base 14: mod_base = OTHER; note = 2'-O-methylcytidine-3'-phosphate
  modified_base 15: mod_base = OTHER; note = 2'-O-methyluridine-3'-phosphate
  modified_base 16: mod_base = OTHER; note = 2'-O-methylcytidine-3'-phosphate
  modified_base 17: mod_base = OTHER; note = 2'-O-methylguanosine-3'-phosphate
  modified_base 18: mod_base = OTHER; note = 2'-O-methyladenosine-3'-phosphate
  modified_base 19: mod_base = OTHER; note = 2'-O-methylguanosine-3'-phosphate
  modified_base 20: mod_base = OTHER; note = 2'-O-methyladenosine-3'-phosphate
  modified_base 21: mod_base = OTHER; note = 2'-O-methyluridine-3'-phosphate ((2S,4R)-1-[29-[[2-(acetylamino)-2-deoxy-beta-D-galactopyra nosyl]oxy]-14,14-bis[[3-[[3-[[5-[[2-(acetylamino)-2-deoxy-b eta-D-galactopyranosyl]oxy]-1-oxopentyl]amino]propyl]amino] -3-oxopropoxy]methyl]-1,12,19,25-tetraoxo-16-oxa-13,20,24-t riazanonacos-1-yl]-4-hydroxy-2-pyrrolidinyl)methyl ester
tgttcaagatgtcctcgagat

SEQ ID NO: 2935 - RNA, 23 nt, synthetic construct
  source 1..23: mol_type = other RNA
  modified_base 1: mod_base = OTHER; note = 2'-O-methyladenosine-3'-phosphorothioate
  modified_base 2: mod_base = OTHER; note = 2'-deoxy-2'-fluorouridine-3'-phosphorothioate
  modified_base 3: mod_base = OTHER; note = 2'-O-methylcytidine-3'-phosphate
  modified_base 4: mod_base = OTHER; note = 2'-O-methyluridine-3'-phosphate
  modified_base 5: mod_base = OTHER; note = 2'-O-methylcytidine-3'-phosphate
  modified_base 6: mod_base = OTHER; note = 2'-deoxy-2'-fluoroguanosine-3'-phosphate
  modified_base 7: mod_base = OTHER; note = 2'-O-methyladenosine-3'-phosphate
  modified_base 8: mod_base = OTHER; note = 2'-deoxy-2'-fluoroguanosine-3'-phosphate
  modified_base 9: mod_base = OTHER; note = 2'-deoxy-2'-fluoroguanosine-3'-phosphate
  modified_base 10: mod_base = OTHER; note = 2'-O-methyladenosine-3'-phosphate
  modified_base 11: mod_base = OTHER; note = 2'-O-methylcytidine-3'-phosphate
  modified_base 12: mod_base = OTHER; note = 2'-O-methyladenosine-3'-phosphate
  modified_base 13: mod_base = OTHER; note = 2'-O-methyluridine-3'-phosphate
  modified_base 14: mod_base = OTHER; note = 2'-deoxy-2'-fluorocytidine-3'-phosphate
  modified_base 15: mod_base = OTHER; note = 2'-O-methyluridine-3'-phosphate
  modified_base 16: mod_base = OTHER; note = 2'-deoxy-2'-fluorouridine-3'-phosphate
  modified_base 17: mod_base = OTHER; note = 2'-O-methylguanosine-3'-phosphate
  modified_base 18: mod_base = OTHER; note = 2'-O-methyladenosine-3'-phosphate
  modified_base 19: mod_base = OTHER; note = 2'-O-methyladenosine-3'-phosphate
  modified_base 20: mod_base = OTHER; note = 2'-O-methylcytidine-3'-phosphate
  modified_base 21: mod_base = OTHER; note = 2'-O-methyladenosine-3'-phosphorothioate
  modified_base 22: mod_base = OTHER; note = 2'-O-methylcytidine-3'-phosphorothioate
  modified_base 23: mod_base = OTHER; note = 2'-O-methylcytidine
atctcgaggacatcttgaacacc

SEQ ID NO: 2936 - RNA, 21 nt, synthetic construct
  source 1..21: mol_type = other RNA
  modified_base 1: mod_base = OTHER; note = 2'-O-methylguanosine-3'-phosphorothioate
  modified_base 2: mod_base = OTHER; note = 2'-O-methyluridine-3'-phosphorothioate
  modified_base 3: mod_base = OTHER; note = 2'-O-methylguanosine-3'-phosphate
  modified_base 4: mod_base = OTHER; note = 2'-O-methyluridine-3'-phosphate
  modified_base 5: mod_base = OTHER; note = 2'-O-methyluridine-3'-phosphate
  modified_base 6: mod_base = OTHER; note = 2'-O-methylcytidine-3'-phosphate
  modified_base 7: mod_base = OTHER; note = 2'-deoxy-2'-fluoroadenosine-3'-phosphate
  modified_base 8: mod_base = OTHER; note = 2'-O-methyladenosine-3'-phosphate
  modified_base 9: mod_base = OTHER; note = 2'-deoxy-2'-fluoroguanosine-3'-phosphate
  modified_base 10: mod_base = OTHER; note = 2'-deoxy-2'-fluoroadenosine-3'-phosphate
  modified_base 11: mod_base = OTHER; note = 2'-deoxy-2'-fluorouridine-3'-phosphate
  modified_base 12: mod_base = OTHER; note = 2'-O-methylguanosine-3'-phosphate
  modified_base 13: mod_base = OTHER; note = 2'-O-methyluridine-3'-phosphate
  modified_base 14: mod_base = OTHER; note = 2'-O-methylcytidine-3'-phosphate
  modified_base 15: mod_base = OTHER; note = 2'-O-methylcytidine-3'-phosphate
  modified_base 16: mod_base = OTHER; note = 2'-O-methyluridine-3'-phosphate
  modified_base 17: mod_base = OTHER; note = 2'-O-methylcytidine-3'-phosphate
  modified_base 18: mod_base = OTHER; note = 2'-O-methylguanosine-3'-phosphate
  modified_base 19: mod_base = OTHER; note = 2'-O-methyladenosine-3'-phosphate
  modified_base 20: mod_base = OTHER; note = 2'-O-methylguanosine-3'-phosphate
  modified_base 21: mod_base = OTHER; note = 2'-O-methyladenosine-3'-phosphate ((2S,4R)-1-[29-[[2-(acetylamino)-2-deoxy-beta-D-galactopyra nosyl]oxy]-14,14-bis[[3-[[3-[[5-[[2-(acetylamino)-2-deoxy-b eta-D-galactopyranosyl]oxy]-1-oxopentyl]amino]propyl]amino] -3-oxopropoxy]methyl]-1,12,19,25-tetraoxo-16-oxa-13,20,24-t riazanonacos-1-yl]-4-hydroxy-2-pyrrolidinyl)methyl ester
gtgttcaagatgtcctcgaga

SEQ ID NO: 2937 - RNA, 23 nt, synthetic construct
  source 1..23: mol_type = other RNA
  modified_base 1: mod_base = OTHER; note = 2'-O-methyluridine-3'-phosphorothioate
  modified_base 2: mod_base = OTHER; note = 2'-deoxy-2'-fluorocytidine-3'-phosphorothioate
  modified_base 3: mod_base = OTHER; note = 2'-O-methyluridine-3'-phosphate
  modified_base 4: mod_base = OTHER; note = 2'-O-methylcytidine-3'-phosphate
  modified_base 5: mod_base = OTHER; note = 2'-O-methylguanosine-3'-phosphate
  modified_base 6: mod_base = OTHER; note = 2'-deoxy-2'-fluoroadenosine-3'-phosphate
  modified_base 7: mod_base = OTHER; note = 2'-O-methylguanosine-3'-phosphate
  modified_base 8: mod_base = OTHER; note = 2'-deoxy-2'-fluoroguanosine-3'-phosphate
  modified_base 9: mod_base = OTHER; note = 2'-deoxy-2'-fluoroadenosine-3'-phosphate
  modified_base 10: mod_base = OTHER; note = 2'-O-methylcytidine-3'-phosphate
  modified_base 11: mod_base = OTHER; note = 2'-O-methyladenosine-3'-phosphate
  modified_base 12: mod_base = OTHER; note = 2'-O-methyluridine-3'-phosphate
  modified_base 13: mod_base = OTHER; note = 2'-O-methylcytidine-3'-phosphate
  modified_base 14: mod_base = OTHER; note = 2'-deoxy-2'-fluorouridine-3'-phosphate
  modified_base 15: mod_base = OTHER; note = 2'-O-methyluridine-3'-phosphate
  modified_base 16: mod_base = OTHER; note = 2'-deoxy-2'-fluoroguanosine-3'-phosphate
  modified_base 17: mod_base = OTHER; note = 2'-O-methyladenosine-3'-phosphate
  modified_base 18: mod_base = OTHER; note = 2'-O-methyladenosine-3'-phosphate
  modified_base 19: mod_base = OTHER; note = 2'-O-methylcytidine-3'-phosphate
  modified_base 20: mod_base = OTHER; note = 2'-O-methyladenosine-3'-phosphate
  modified_base 21: mod_base = OTHER; note = 2'-O-methylcytidine-3'-phosphorothioate
  modified_base 22: mod_base = OTHER; note = 2'-O-methylcytidine-3'-phosphorothioate
  modified_base 23: mod_base = OTHER; note = 2'-O-methyluridine
tctcgaggacatcttgaacacct

SEQ ID NO: 2938 - RNA, 21 nt, synthetic construct
  source 1..21: mol_type = other RNA
  modified_base 1: mod_base = OTHER; note = 2'-O-methyladenosine-3'-phosphorothioate
  modified_base 2: mod_base = OTHER; note = 2'-O-methylcytidine-3'-phosphorothioate
  modified_base 3: mod_base = OTHER; note = 2'-O-methyladenosine-3'-phosphate
  modified_base 4: mod_base = OTHER; note = 2'-O-methyluridine-3'-phosphate
  modified_base 5: mod_base = OTHER; note = 2'-O-methylguanosine-3'-phosphate
  modified_base 6: mod_base = OTHER; note = 2'-O-methylcytidine-3'-phosphate
  modified_base 7: mod_base = OTHER; note = 2'-deoxy-2'-fluorouridine-3'-phosphate
  modified_base 8: mod_base = OTHER; note = 2'-O-methyladenosine-3'-phosphate
  modified_base 9: mod_base = OTHER; note = 2'-deoxy-2'-fluoroadenosine-3'-phosphate
  modified_base 10: mod_base = OTHER; note = 2'-deoxy-2'-fluoroadenosine-3'-phosphate
  modified_base 11: mod_base = OTHER; note = 2'-deoxy-2'-fluorouridine-3'-phosphate
  modified_base 12: mod_base = OTHER; note = 2'-O-methylcytidine-3'-phosphate
  modified_base 13: mod_base = OTHER; note = 2'-O-methyladenosine-3'-phosphate
  modified_base 14: mod_base = OTHER; note = 2'-O-methylguanosine-3'-phosphate
  modified_base 15: mod_base = OTHER; note = 2'-O-methyluridine-3'-phosphate
  modified_base 16: mod_base = OTHER; note = 2'-O-methyladenosine-3'-phosphate
  modified_base 17: mod_base = OTHER; note = 2'-O-methylcytidine-3'-phosphate
  modified_base 18: mod_base = OTHER; note = 2'-O-methyluridine-3'-phosphate
  modified_base 19: mod_base = OTHER; note = 2'-O-methyluridine-3'-phosphate
  modified_base 20: mod_base = OTHER; note = 2'-O-methylcytidine-3'-phosphate
  modified_base 21: mod_base = OTHER; note = 2'-O-methylcytidine-3'-phosphate ((2S,4R)-1-[29-[[2-(acetylamino)-2-deoxy-beta-D-galactopyra nosyl]oxy]-14,14-bis[[3-[[3-[[5-[[2-(acetylamino)-2-deoxy-b eta-D-galactopyranosyl]oxy]-1-oxopentyl]amino]propyl]amino] -3-oxopropoxy]methyl]-1,12,19,25-tetraoxo-16-oxa-13,20,24-t riazanonacos-1-yl]-4-hydroxy-2-pyrrolidinyl)methyl ester
acatgctaaatcagtacttcc

SEQ ID NO: 2939 - RNA, 23 nt, synthetic construct
  source 1..23: mol_type = other RNA
  modified_base 1: mod_base = OTHER; note = 2'-O-methylguanosine-3'-phosphorothioate
  modified_base 2: mod_base = OTHER; note = 2'-deoxy-2'-fluoroguanosine-3'-phosphorothioate
  modified_base 3: mod_base = OTHER; note = 2'-O-methyladenosine-3'-phosphate
  modified_base 4: mod_base = OTHER; note = 2'-O-methyladenosine-3'-phosphate
  modified_base 5: mod_base = OTHER; note = 2'-O-methylguanosine-3'-phosphate
  modified_base 6: mod_base = OTHER; note = 2'-deoxy-2'-fluorouridine-3'-phosphate
  modified_base 7: mod_base = OTHER; note = 2'-O-methyladenosine-3'-phosphate
  modified_base 8: mod_base = OTHER; note = 2'-deoxy-2'-fluorocytidine-3'-phosphate
  modified_base 9: mod_base = OTHER; note = 2'-deoxy-2'-fluorouridine-3'-phosphate
  modified_base 10: mod_base = OTHER; note = 2'-O-methylguanosine-3'-phosphate
  modified_base 11: mod_base = OTHER; note = 2'-O-methyladenosine-3'-phosphate
  modified_base 12: mod_base = OTHER; note = 2'-O-methyluridine-3'-phosphate
  modified_base 13: mod_base = OTHER; note = 2'-O-methyluridine-3'-phosphate
  modified_base 14: mod_base = OTHER; note = 2'-deoxy-2'-fluorouridine-3'-phosphate
  modified_base 15: mod_base = OTHER; note = 2'-O-methyladenosine-3'-phosphate
  modified_base 16: mod_base = OTHER; note = 2'-deoxy-2'-fluoroguanosine-3'-phosphate
  modified_base 17: mod_base = OTHER; note = 2'-O-methylcytidine-3'-phosphate
  modified_base 18: mod_base = OTHER; note = 2'-O-methyladenosine-3'-phosphate
  modified_base 19: mod_base = OTHER; note = 2'-O-methyluridine-3'-phosphate
  modified_base 20: mod_base = OTHER; note = 2'-O-methylguanosine-3'-phosphate
  modified_base 21: mod_base = OTHER; note = 2'-O-methyluridine-3'-phosphorothioate
  modified_base 22: mod_base = OTHER; note = 2'-O-methyluridine-3'-phosphorothioate
  modified_base 23: mod_base = OTHER; note = 2'-O-methylguanosine
ggaagtactgatttagcatgttg

SEQ ID NO: 2940 - RNA, 21 nt, synthetic construct
  source 1..21: mol_type = other RNA
  modified_base 1: mod_base = OTHER; note = 2'-O-methylcytidine-3'-phosphorothioate
  modified_base 2: mod_base = OTHER; note = 2'-O-methyladenosine-3'-phosphorothioate
  modified_base 3: mod_base = OTHER; note = 2'-O-methyluridine-3'-phosphate
  modified_base 4: mod_base = OTHER; note = 2'-O-methylguanosine-3'-phosphate
  modified_base 5: mod_base = OTHER; note = 2'-O-methylcytidine-3'-phosphate
  modified_base 6: mod_base = OTHER; note = 2'-O-methyluridine-3'-phosphate
  modified_base 7: mod_base = OTHER; note = 2'-deoxy-2'-fluoroadenosine-3'-phosphate
  modified_base 8: mod_base = OTHER; note = 2'-O-methyladenosine-3'-phosphate
  modified_base 9: mod_base = OTHER; note = 2'-deoxy-2'-fluoroadenosine-3'-phosphate
  modified_base 10: mod_base = OTHER; note = 2'-deoxy-2'-fluorouridine-3'-phosphate
  modified_base 11: mod_base = OTHER; note = 2'-deoxy-2'-fluorocytidine-3'-phosphate
  modified_base 12: mod_base = OTHER; note = 2'-O-methyladenosine-3'-phosphate
  modified_base 13: mod_base = OTHER; note = 2'-O-methylguanosine-3'-phosphate
  modified_base 14: mod_base = OTHER; note = 2'-O-methyluridine-3'-phosphate
  modified_base 15: mod_base = OTHER; note = 2'-O-methyladenosine-3'-phosphate
  modified_base 16: mod_base = OTHER; note = 2'-O-methylcytidine-3'-phosphate
  modified_base 17: mod_base = OTHER; note = 2'-O-methyluridine-3'-phosphate
  modified_base 18: mod_base = OTHER; note = 2'-O-methyluridine-3'-phosphate
  modified_base 19: mod_base = OTHER; note = 2'-O-methylcytidine-3'-phosphate
  modified_base 20: mod_base = OTHER; note = 2'-O-methylcytidine-3'-phosphate
  modified_base 21: mod_base = OTHER; note = 2'-O-methyladenosine-3'-phosphate ((2S,4R)-1-[29-[[2-(acetylamino)-2-deoxy-beta-D-galactopyra nosyl]oxy]-14,14-bis[[3-[[3-[[5-[[2-(acetylamino)-2-deoxy-b eta-D-galactopyranosyl]oxy]-1-oxopentyl]amino]propyl]amino] -3-oxopropoxy]methyl]-1,12,19,25-tetraoxo-16-oxa-13,20,24-t riazanonacos-1-yl]-4-hydroxy-2-pyrrolidinyl)methyl ester
catgctaaatcagtacttcca

SEQ ID NO: 2941 - RNA, 23 nt, synthetic construct
  source 1..23: mol_type = other RNA
  modified_base 1: mod_base = OTHER; note = 2'-O-methyluridine-3'-phosphorothioate
  modified_base 2: mod_base = OTHER; note = 2'-deoxy-2'-fluoroguanosine-3'-phosphorothioate
  modified_base 3: mod_base = OTHER; note = 2'-O-methylguanosine-3'-phosphate
  modified_base 4: mod_base = OTHER; note = 2'-O-methyladenosine-3'-phosphate
  modified_base 5: mod_base = OTHER; note = 2'-O-methyladenosine-3'-phosphate
  modified_base 6: mod_base = OTHER; note = 2'-deoxy-2'-fluoroguanosine-3'-phosphate
  modified_base 7: mod_base = OTHER; note = 2'-O-methyluridine-3'-phosphate
  modified_base 8: mod_base = OTHER; note = 2'-deoxy-2'-fluoroadenosine-3'-phosphate
  modified_base 9: mod_base = OTHER; note = 2'-deoxy-2'-fluorocytidine-3'-phosphate
  modified_base 10: mod_base = OTHER; note = 2'-O-methyluridine-3'-phosphate
  modified_base 11: mod_base = OTHER; note = 2'-O-methylguanosine-3'-phosphate
  modified_base 12: mod_base = OTHER; note = 2'-O-methyladenosine-3'-phosphate
  modified_base 13: mod_base = OTHER; note = 2'-O-methyluridine-3'-phosphate
  modified_base 14: mod_base = OTHER; note = 2'-deoxy-2'-fluorouridine-3'-phosphate
  modified_base 15: mod_base = OTHER; note = 2'-O-methyluridine-3'-phosphate
  modified_base 16: mod_base = OTHER; note = 2'-deoxy-2'-fluoroadenosine-3'-phosphate
  modified_base 17: mod_base = OTHER; note = 2'-O-methylguanosine-3'-phosphate
  modified_base 18: mod_base = OTHER; note = 2'-O-methylcytidine-3'-phosphate
  modified_base 19: mod_base = OTHER; note = 2'-O-methyladenosine-3'-phosphate
  modified_base 20: mod_base = OTHER; note = 2'-O-methyluridine-3'-phosphate
  modified_base 21: mod_base = OTHER; note = 2'-O-methylguanosine-3'-phosphorothioate
  modified_base 22: mod_base = OTHER; note = 2'-O-methyluridine-3'-phosphorothioate
  modified_base 23: mod_base = OTHER; note = 2'-O-methyluridine
tggaagtactgatttagcatgtt

SEQ ID NO: 2942 - RNA, 21 nt, synthetic construct
  source 1..21: mol_type = other RNA
  modified_base 1: mod_base = OTHER; note = 2'-O-methyladenosine-3'-phosphorothioate
  modified_base 2: mod_base = OTHER; note = 2'-O-methyladenosine-3'-phosphorothioate
  modified_base 3: mod_base = OTHER; note = 2'-O-methylcytidine-3'-phosphate
  modified_base 4: mod_base = OTHER; note = 2'-O-methyladenosine-3'-phosphate
  modified_base 5: mod_base = OTHER; note = 2'-O-methyladenosine-3'-phosphate
  modified_base 6: mod_base = OTHER; note = 2'-O-methylcytidine-3'-phosphate
  modified_base 7: mod_base = OTHER; note = 2'-deoxy-2'-fluoroadenosine-3'-phosphate
  modified_base 8: mod_base = OTHER; note = 2'-O-methyluridine-3'-phosphate
  modified_base 9: mod_base = OTHER; note = 2'-deoxy-2'-fluoroguanosine-3'-phosphate
  modified_base 10: mod_base = OTHER; note = 2'-deoxy-2'-fluorocytidine-3'-phosphate
  modified_base 11: mod_base = OTHER; note = 2'-deoxy-2'-fluorouridine-3'-phosphate
  modified_base 12: mod_base = OTHER; note = 2'-O-methyladenosine-3'-phosphate
  modified_base 13: mod_base = OTHER; note = 2'-O-methyladenosine-3'-phosphate
  modified_base 14: mod_base = OTHER; note = 2'-O-methyladenosine-3'-phosphate
  modified_base 15: mod_base = OTHER; note = 2'-O-methyluridine-3'-phosphate
  modified_base 16: mod_base = OTHER; note = 2'-O-methylcytidine-3'-phosphate
  modified_base 17: mod_base = OTHER; note = 2'-O-methyladenosine-3'-phosphate
  modified_base 18: mod_base = OTHER; note = 2'-O-methylguanosine-3'-phosphate
  modified_base 19: mod_base = OTHER; note = 2'-O-methyluridine-3'-phosphate
  modified_base 20: mod_base = OTHER; note = 2'-O-methyladenosine-3'-phosphate
  modified_base 21: mod_base = OTHER; note = 2'-O-methylcytidine-3'-phosphate ((2S,4R)-1-[29-[[2-(acetylamino)-2-deoxy-beta-D-galactopyra nosyl]oxy]-14,14-bis[[3-[[3-[[5-[[2-(acetylamino)-2-deoxy-b eta-D-galactopyranosyl]oxy]-1-oxopentyl]amino]propyl]amino] -3-oxopropoxy]methyl]-1,12,19,25-tetraoxo-16-oxa-13,20,24-t riazanonacos-1-yl]-4-hydroxy-2-pyrrolidinyl)methyl ester
aacaacatgctaaatcagtac

SEQ ID NO: 2943 - RNA, 23 nt, synthetic construct
  source 1..23: mol_type = other RNA
  modified_base 1: mod_base = OTHER; note = 2'-O-methylguanosine-3'-phosphorothioate
  modified_base 2: mod_base = OTHER; note = 2'-deoxy-2'-fluorouridine-3'-phosphorothioate
  modified_base 3: mod_base = OTHER; note = 2'-O-methyladenosine-3'-phosphate
  modified_base 4: mod_base = OTHER; note = 2'-O-methylcytidine-3'-phosphate
  modified_base 5: mod_base = OTHER; note = 2'-O-methyluridine-3'-phosphate
  modified_base 6: mod_base = OTHER; note = 2'-deoxy-2'-fluoroguanosine-3'-phosphate
  modified_base 7: mod_base = OTHER; note = 2'-O-methyladenosine-3'-phosphate
  modified_base 8: mod_base = OTHER; note = 2'-deoxy-2'-fluorouridine-3'-phosphate
  modified_base 9: mod_base = OTHER; note = 2'-deoxy-2'-fluorouridine-3'-phosphate
  modified_base 10: mod_base = OTHER; note = 2'-O-methyluridine-3'-phosphate
  modified_base 11: mod_base = OTHER; note = 2'-O-methyladenosine-3'-phosphate
  modified_base 12: mod_base = OTHER; note = 2'-O-methylguanosine-3'-phosphate
  modified_base 13: mod_base = OTHER; note = 2'-O-methylcytidine-3'-phosphate
  modified_base 14: mod_base = OTHER; note = 2'-deoxy-2'-fluoroadenosine-3'-phosphate
  modified_base 15: mod_base = OTHER; note = 2'-O-methyluridine-3'-phosphate
  modified_base 16: mod_base = OTHER; note = 2'-deoxy-2'-fluoroguanosine-3'-phosphate
  modified_base 17: mod_base = OTHER; note = 2'-O-methyluridine-3'-phosphate
  modified_base 18: mod_base = OTHER; note = 2'-O-methyluridine-3'-phosphate
  modified_base 19: mod_base = OTHER; note = 2'-O-methylguanosine-3'-phosphate
  modified_base 20: mod_base = OTHER; note = 2'-O-methyluridine-3'-phosphate
  modified_base 21: mod_base = OTHER; note = 2'-O-methyluridine-3'-phosphorothioate
  modified_base 22: mod_base = OTHER; note = 2'-O-methylcytidine-3'-phosphorothioate
  modified_base 23: mod_base = OTHER; note = 2'-O-methyladenosine
gtactgatttagcatgttgttca

SEQ ID NO: 2944 - RNA, 21 nt, synthetic construct
  source 1..21: mol_type = other RNA
  modified_base 1: mod_base = OTHER; note = 2'-O-methylguanosine-3'-phosphorothioate
  modified_base 2: mod_base = OTHER; note = 2'-O-methyladenosine-3'-phosphorothioate
  modified_base 3: mod_base = OTHER; note = 2'-O-methyladenosine-3'-phosphate
  modified_base 4: mod_base = OTHER; note = 2'-O-methylcytidine-3'-phosphate
  modified_base 5: mod_base = OTHER; note = 2'-O-methyladenosine-3'-phosphate
  modified_base 6: mod_base = OTHER; note = 2'-O-methyladenosine-3'-phosphate
  modified_base 7: mod_base = OTHER; note = 2'-deoxy-2'-fluorocytidine-3'-phosphate
  modified_base 8: mod_base = OTHER; note = 2'-O-methyladenosine-3'-phosphate
  modified_base 9: mod_base = OTHER; note = 2'-deoxy-2'-fluorouridine-3'-phosphate
  modified_base 10: mod_base = OTHER; note = 2'-deoxy-2'-fluoroguanosine-3'-phosphate
  modified_base 11: mod_base = OTHER; note = 2'-deoxy-2'-fluorocytidine-3'-phosphate
  modified_base 12: mod_base = OTHER; note = 2'-O-methyluridine-3'-phosphate
  modified_base 13: mod_base = OTHER; note = 2'-O-methyladenosine-3'-phosphate
  modified_base 14: mod_base = OTHER; note = 2'-O-methyladenosine-3'-phosphate
  modified_base 15: mod_base = OTHER; note = 2'-O-methyladenosine-3'-phosphate
  modified_base 16: mod_base = OTHER; note = 2'-O-methyluridine-3'-phosphate
  modified_base 17: mod_base = OTHER; note = 2'-O-methylcytidine-3'-phosphate
  modified_base 18: mod_base = OTHER; note = 2'-O-methyladenosine-3'-phosphate
  modified_base 19: mod_base = OTHER; note = 2'-O-methylguanosine-3'-phosphate
  modified_base 20: mod_base = OTHER; note = 2'-O-methyluridine-3'-phosphate
  modified_base 21: mod_base = OTHER; note = 2'-O-methyladenosine-3'-phosphate ((2S,4R)-1-[29-[[2-(acetylamino)-2-deoxy-beta-D-galactopyra nosyl]oxy]-14,14-bis[[3-[[3-[[5-[[2-(acetylamino)-2-deoxy-b eta-D-galactopyranosyl]oxy]-1-oxopentyl]amino]propyl]amino] -3-oxopropoxy]methyl]-1,12,19,25-tetraoxo-16-oxa-13,20,24-t riazanonacos-1-yl]-4-hydroxy-2-pyrrolidinyl)methyl ester
gaacaacatgctaaatcagta

SEQ ID NO: 2945 - RNA, 23 nt, synthetic construct
  source 1..23: mol_type = other RNA
  modified_base 1: mod_base = OTHER; note = 2'-O-methyluridine-3'-phosphorothioate
  modified_base 2: mod_base = OTHER; note = 2'-deoxy-2'-fluoroadenosine-3'-phosphorothioate
  modified_base 3: mod_base = OTHER; note = 2'-O-methylcytidine-3'-phosphate
  modified_base 4: mod_base = OTHER; note = 2'-O-methyluridine-3'-phosphate
  modified_base 5: mod_base = OTHER; note = 2'-O-methylguanosine-3'-phosphate
  modified_base 6: mod_base = OTHER; note = 2'-deoxy-2'-fluoroadenosine-3'-phosphate
  modified_base 7: mod_base = OTHER; note = 2'-O-methyluridine-3'-phosphate
  modified_base 8: mod_base = OTHER; note = 2'-deoxy-2'-fluorouridine-3'-phosphate
  modified_base 9: mod_base = OTHER; note = 2'-deoxy-2'-fluorouridine-3'-phosphate
  modified_base 10: mod_base = OTHER; note = 2'-O-methyladenosine-3'-phosphate
  modified_base 11: mod_base = OTHER; note = 2'-O-methylguanosine-3'-phosphate
  modified_base 12: mod_base = OTHER; note = 2'-O-methylcytidine-3'-phosphate
  modified_base 13: mod_base = OTHER; note = 2'-O-methyladenosine-3'-phosphate
  modified_base 14: mod_base = OTHER; note = 2'-deoxy-2'-fluorouridine-3'-phosphate
  modified_base 15: mod_base = OTHER; note = 2'-O-methylguanosine-3'-phosphate
  modified_base 16: mod_base = OTHER; note = 2'-deoxy-2'-fluorouridine-3'-phosphate
  modified_base 17: mod_base = OTHER; note = 2'-O-methyluridine-3'-phosphate
  modified_base 18: mod_base = OTHER; note = 2'-O-methylguanosine-3'-phosphate
  modified_base 19: mod_base = OTHER; note = 2'-O-methyluridine-3'-phosphate
  modified_base 20: mod_base = OTHER; note = 2'-O-methyluridine-3'-phosphate
  modified_base 21: mod_base = OTHER; note = 2'-O-methylcytidine-3'-phosphorothioate
  modified_base 22: mod_base = OTHER; note = 2'-O-methyladenosine-3'-phosphorothioate
  modified_base 23: mod_base = OTHER; note = 2'-O-methyluridine
tactgatttagcatgttgttcat

SEQ ID NO: 2946 - RNA, 21 nt, synthetic construct
  source 1..21: mol_type = other RNA
  modified_base 1: mod_base = OTHER; note = 2'-O-methylguanosine-3'-phosphorothioate
  modified_base 2: mod_base = OTHER; note = 2'-O-methyladenosine-3'-phosphorothioate
  modified_base 3: mod_base = OTHER; note = 2'-O-methyladenosine-3'-phosphate
  modified_base 4: mod_base = OTHER; note = 2'-O-methyladenosine-3'-phosphate
  modified_base 5: mod_base = OTHER; note = 2'-O-methylguanosine-3'-phosphate
  modified_base 6: mod_base = OTHER; note = 2'-O-methylguanosine-3'-phosphate
  modified_base 7: mod_base = OTHER; note = 2'-deoxy-2'-fluorocytidine-3'-phosphate
  modified_base 8: mod_base = OTHER; note = 2'-O-methyladenosine-3'-phosphate
  modified_base 9: mod_base = OTHER; note = 2'-deoxy-2'-fluorocytidine-3'-phosphate
  modified_base 10: mod_base = OTHER; note = 2'-deoxy-2'-fluorouridine-3'-phosphate
  modified_base 11: mod_base = OTHER; note = 2'-deoxy-2'-fluoroguanosine-3'-phosphate
  modified_base 12: mod_base = OTHER; note = 2'-O-methyladenosine-3'-phosphate
  modified_base 13: mod_base = OTHER; note = 2'-O-methyluridine-3'-phosphate
  modified_base 14: mod_base = OTHER; note = 2'-O-methylguanosine-3'-phosphate
  modified_base 15: mod_base = OTHER; note = 2'-O-methyluridine-3'-phosphate
  modified_base 16: mod_base = OTHER; note = 2'-O-methyluridine-3'-phosphate
  modified_base 17: mod_base = OTHER; note = 2'-O-methylcytidine-3'-phosphate
  modified_base 18: mod_base = OTHER; note = 2'-O-methyluridine-3'-phosphate
  modified_base 19: mod_base = OTHER; note = 2'-O-methylguanosine-3'-phosphate
  modified_base 20: mod_base = OTHER; note = 2'-O-methyladenosine-3'-phosphate
  modified_base 21: mod_base = OTHER; note = 2'-O-methyladenosine-3'-phosphate ((2S,4R)-1-[29-[[2-(acetylamino)-2-deoxy-beta-D-galactopyra nosyl]oxy]-14,14-bis[[3-[[3-[[5-[[2-(acetylamino)-2-deoxy-b eta-D-galactopyranosyl]oxy]-1-oxopentyl]amino]propyl]amino] -3-oxopropoxy]methyl]-1,12,19,25-tetraoxo-16-oxa-13,20,24-t riazanonacos-1-yl]-4-hydroxy-2-pyrrolidinyl)methyl ester
gaaaggcactgatgttctgaa

SEQ ID NO: 2947 - RNA, 23 nt, synthetic construct
  source 1..23: mol_type = other RNA
  modified_base 1: mod_base = OTHER; note = 2'-O-methyluridine-3'-phosphorothioate
  modified_base 2: mod_base = OTHER; note = 2'-deoxy-2'-fluorouridine-3'-phosphorothioate
  modified_base 3: mod_base = OTHER; note = 2'-O-methylcytidine-3'-phosphate
  modified_base 4: mod_base = OTHER; note = 2'-O-methyladenosine-3'-phosphate
  modified_base 5: mod_base = OTHER; note = 2'-O-methylguanosine-3'-phosphate
  modified_base 6: mod_base = OTHER; note = 2'-deoxy-2'-fluoroadenosine-3'-phosphate
  modified_base 7: mod_base = OTHER; note = 2'-O-methyladenosine-3'-phosphate
  modified_base 8: mod_base = OTHER; note = 2'-deoxy-2'-fluorocytidine-3'-phosphate
  modified_base 9: mod_base = OTHER; note = 2'-deoxy-2'-fluoroadenosine-3'-phosphate
  modified_base 10: mod_base = OTHER; note = 2'-O-methyluridine-3'-phosphate
  modified_base 11: mod_base = OTHER; note = 2'-O-methylcytidine-3'-phosphate
  modified_base 12: mod_base = OTHER; note = 2'-O-methyladenosine-3'-phosphate
  modified_base 13: mod_base = OTHER; note = 2'-O-methylguanosine-3'-phosphate
  modified_base 14: mod_base = OTHER; note = 2'-deoxy-2'-fluorouridine-3'-phosphate
  modified_base 15: mod_base = OTHER; note = 2'-O-methylguanosine-3'-phosphate
  modified_base 16: mod_base = OTHER; note = 2'-deoxy-2'-fluorocytidine-3'-phosphate
  modified_base 17: mod_base = OTHER; note = 2'-O-methylcytidine-3'-phosphate
  modified_base 18: mod_base = OTHER; note = 2'-O-methyluridine-3'-phosphate
  modified_base 19: mod_base = OTHER; note = 2'-O-methyluridine-3'-phosphate
  modified_base 20: mod_base = OTHER; note = 2'-O-methyluridine-3'-phosphate
  modified_base 21: mod_base = OTHER; note = 2'-O-methylcytidine-3'-phosphorothioate
  modified_base 22: mod_base = OTHER; note = 2'-O-methylcytidine-3'-phosphorothioate
  modified_base 23: mod_base = OTHER; note = 2'-O-methylguanosine
ttcagaacatcagtgcctttccg

SEQ ID NO: 2948 - RNA, 21 nt, synthetic construct
  source 1..21: mol_type = other RNA
  modified_base 1: mod_base = OTHER; note = 2'-O-methyladenosine-3'-phosphorothioate
  modified_base 2: mod_base = OTHER; note = 2'-O-methyladenosine-3'-phosphorothioate
  modified_base 3: mod_base = OTHER; note = 2'-O-methyladenosine-3'-phosphate
  modified_base 4: mod_base = OTHER; note = 2'-O-methylguanosine-3'-phosphate
  modified_base 5: mod_base = OTHER; note = 2'-O-methylguanosine-3'-phosphate
  modified_base 6: mod_base = OTHER; note = 2'-O-methylcytidine-3'-phosphate
  modified_base 7: mod_base = OTHER; note = 2'-deoxy-2'-fluoroadenosine-3'-phosphate
  modified_base 8: mod_base = OTHER; note = 2'-O-methylcytidine-3'-phosphate
  modified_base 9: mod_base = OTHER; note = 2'-deoxy-2'-fluorouridine-3'-phosphate
  modified_base 10: mod_base = OTHER; note = 2'-deoxy-2'-fluoroguanosine-3'-phosphate
  modified_base 11: mod_base = OTHER; note = 2'-deoxy-2'-fluoroadenosine-3'-phosphate
  modified_base 12: mod_base = OTHER; note = 2'-O-methyluridine-3'-phosphate
  modified_base 13: mod_base = OTHER; note = 2'-O-methylguanosine-3'-phosphate
  modified_base 14: mod_base = OTHER; note = 2'-O-methyluridine-3'-phosphate
  modified_base 15: mod_base = OTHER; note = 2'-O-methyluridine-3'-phosphate
  modified_base 16: mod_base = OTHER; note = 2'-O-methylcytidine-3'-phosphate
  modified_base 17: mod_base = OTHER; note = 2'-O-methyluridine-3'-phosphate
  modified_base 18: mod_base = OTHER; note = 2'-O-methylguanosine-3'-phosphate
  modified_base 19: mod_base = OTHER; note = 2'-O-methyladenosine-3'-phosphate
  modified_base 20: mod_base = OTHER; note = 2'-O-methyladenosine-3'-phosphate
  modified_base 21: mod_base = OTHER; note = 2'-O-methyladenosine-3'-phosphate ((2S,4R)-1-[29-[[2-(acetylamino)-2-deoxy-beta-D-galactopyra nosyl]oxy]-14,14-bis[[3-[[3-[[5-[[2-(acetylamino)-2-deoxy-b eta-D-galactopyranosyl]oxy]-1-oxopentyl]amino]propyl]amino] -3-oxopropoxy]methyl]-1,12,19,25-tetraoxo-16-oxa-13,20,24-t riazanonacos-1-yl]-4-hydroxy-2-pyrrolidinyl)methyl ester
aaaggcactgatgttctgaaa

SEQ ID NO: 2949 - RNA, 23 nt, synthetic construct
  source 1..23: mol_type = other RNA
  modified_base 1: mod_base = OTHER; note = 2'-O-methyluridine-3'-phosphorothioate
  modified_base 2: mod_base = OTHER; note = 2'-deoxy-2'-fluorouridine-3'-phosphorothioate
  modified_base 3: mod_base = OTHER; note = 2'-O-methyluridine-3'-phosphate
  modified_base 4: mod_base = OTHER; note = 2'-O-methylcytidine-3'-phosphate
  modified_base 5: mod_base = OTHER; note = 2'-O-methyladenosine-3'-phosphate
  modified_base 6: mod_base = OTHER; note = 2'-deoxy-2'-fluoroguanosine-3'-phosphate
  modified_base 7: mod_base = OTHER; note = 2'-O-methyladenosine-3'-phosphate
  modified_base 8: mod_base = OTHER; note = 2'-deoxy-2'-fluoroadenosine-3'-phosphate
  modified_base 9: mod_base = OTHER; note = 2'-deoxy-2'-fluorocytidine-3'-phosphate
  modified_base 10: mod_base = OTHER; note = 2'-O-methyladenosine-3'-phosphate
  modified_base 11: mod_base = OTHER; note = 2'-O-methyluridine-3'-phosphate
  modified_base 12: mod_base = OTHER; note = 2'-O-methylcytidine-3'-phosphate
  modified_base 13: mod_base = OTHER; note = 2'-O-methyladenosine-3'-phosphate
  modified_base 14: mod_base = OTHER; note = 2'-deoxy-2'-fluoroguanosine-3'-phosphate
  modified_base 15: mod_base = OTHER; note = 2'-O-methyluridine-3'-phosphate
  modified_base 16: mod_base = OTHER; note = 2'-deoxy-2'-fluoroguanosine-3'-phosphate
  modified_base 17: mod_base = OTHER; note = 2'-O-methylcytidine-3'-phosphate
  modified_base 18: mod_base = OTHER; note = 2'-O-methylcytidine-3'-phosphate
  modified_base 19: mod_base = OTHER; note = 2'-O-methyluridine-3'-phosphate
  modified_base 20: mod_base = OTHER; note = 2'-O-methyluridine-3'-phosphate
  modified_base 21: mod_base = OTHER; note = 2'-O-methyluridine-3'-phosphorothioate
  modified_base 22: mod_base = OTHER; note = 2'-O-methylcytidine-3'-phosphorothioate
  modified_base 23: mod_base = OTHER; note = 2'-O-methylcytidine
tttcagaacatcagtgcctttcc

SEQ ID NO: 2950 - RNA, 21 nt, synthetic construct
  source 1..21: mol_type = other RNA
  modified_base 1: mod_base = OTHER; note = 2'-O-methyluridine-3'-phosphorothioate
  modified_base 2: mod_base = OTHER; note = 2'-O-methylguanosine-3'-phosphorothioate
  modified_base 3: mod_base = OTHER; note = 2'-O-methylcytidine-3'-phosphate
  modified_base 4: mod_base = OTHER; note = 2'-O-methylguanosine-3'-phosphate
  modified_base 5: mod_base = OTHER; note = 2'-O-methylguanosine-3'-phosphate
  modified_base 6: mod_base = OTHER; note = 2'-O-methyladenosine-3'-phosphate
  modified_base 7: mod_base = OTHER; note = 2'-deoxy-2'-fluoroadenosine-3'-phosphate
  modified_base 8: mod_base = OTHER; note = 2'-O-methyladenosine-3'-phosphate
  modified_base 9: mod_base = OTHER; note = 2'-deoxy-2'-fluoroguanosine-3'-phosphate
  modified_base 10: mod_base = OTHER; note = 2'-deoxy-2'-fluoroguanosine-3'-phosphate
  modified_base 11: mod_base = OTHER; note = 2'-deoxy-2'-fluorocytidine-3'-phosphate
  modified_base 12: mod_base = OTHER; note = 2'-O-methyladenosine-3'-phosphate
  modified_base 13: mod_base = OTHER; note = 2'-O-methylcytidine-3'-phosphate
  modified_base 14: mod_base = OTHER; note = 2'-O-methyluridine-3'-phosphate
  modified_base 15: mod_base = OTHER; note = 2'-O-methylguanosine-3'-phosphate
  modified_base 16: mod_base = OTHER; note = 2'-O-methyladenosine-3'-phosphate
  modified_base 17: mod_base = OTHER; note = 2'-O-methyluridine-3'-phosphate
  modified_base 18: mod_base = OTHER; note = 2'-O-methylguanosine-3'-phosphate
  modified_base 19: mod_base = OTHER; note = 2'-O-methyluridine-3'-phosphate
  modified_base 20: mod_base = OTHER; note = 2'-O-methyluridine-3'-phosphate
  modified_base 21: mod_base = OTHER; note = 2'-O-methylcytidine-3'-phosphate ((2S,4R)-1-[29-[[2-(acetylamino)-2-deoxy-beta-D-galactopyra nosyl]oxy]-14,14-bis[[3-[[3-[[5-[[2-(acetylamino)-2-deoxy-b eta-D-galactopyranosyl]oxy]-1-oxopentyl]amino]propyl]amino] -3-oxopropoxy]methyl]-1,12,19,25-tetraoxo-16-oxa-13,20,24-t riazanonacos-1-yl]-4-hydroxy-2-pyrrolidinyl)methyl ester
tgcggaaaggcactgatgttc

SEQ ID NO: 2951 - RNA, 23 nt, synthetic construct
  source 1..23: mol_type = other RNA
  modified_base 1: mod_base = OTHER; note = 2'-O-methylguanosine-3'-phosphorothioate
  modified_base 2: mod_base = OTHER; note = 2'-deoxy-2'-fluoroadenosine-3'-phosphorothioate
  modified_base 3: mod_base = OTHER; note = 2'-O-methyladenosine-3'-phosphate
  modified_base 4: mod_base = OTHER; note = 2'-O-methylcytidine-3'-phosphate
  modified_base 5: mod_base = OTHER; note = 2'-O-methyladenosine-3'-phosphate
  modified_base 6: mod_base = OTHER; note = 2'-deoxy-2'-fluorouridine-3'-phosphate
  modified_base 7: mod_base = OTHER; note = 2'-O-methylcytidine-3'-phosphate
  modified_base 8: mod_base = OTHER; note = 2'-deoxy-2'-fluoroadenosine-3'-phosphate
  modified_base 9: mod_base = OTHER; note = 2'-deoxy-2'-fluoroguanosine-3'-phosphate
  modified_base 10: mod_base = OTHER; note = 2'-O-methyluridine-3'-phosphate
  modified_base 11: mod_base = OTHER; note = 2'-O-methylguanosine-3'-phosphate
  modified_base 12: mod_base = OTHER; note = 2'-O-methylcytidine-3'-phosphate
  modified_base 13: mod_base = OTHER; note = 2'-O-methylcytidine-3'-phosphate
  modified_base 14: mod_base = OTHER; note = 2'-deoxy-2'-fluorouridine-3'-phosphate
  modified_base 15: mod_base = OTHER; note = 2'-O-methyluridine-3'-phosphate
  modified_base 16: mod_base = OTHER; note = 2'-deoxy-2'-fluorouridine-3'-phosphate
  modified_base 17: mod_base = OTHER; note = 2'-O-methylcytidine-3'-phosphate
  modified_base 18: mod_base = OTHER; note = 2'-O-methylcytidine-3'-phosphate
  modified_base 19: mod_base = OTHER; note = 2'-O-methylguanosine-3'-phosphate
  modified_base 20: mod_base = OTHER; note = 2'-O-methylcytidine-3'-phosphate
  modified_base 21: mod_base = OTHER; note = 2'-O-methyladenosine-3'-phosphorothioate
  modified_base 22: mod_base = OTHER; note = 2'-O-methylcytidine-3'-phosphorothioate
  modified_base 23: mod_base = OTHER; note = 2'-O-methyladenosine
gaacatcagtgcctttccgcaca

SEQ ID NO: 2952 - RNA, 21 nt, synthetic construct
  source 1..21: mol_type = other RNA
  modified_base 1: mod_base = OTHER; note = 2'-O-methylguanosine-3'-phosphorothioate
  modified_base 2: mod_base = OTHER; note = 2'-O-methyluridine-3'-phosphorothioate
  modified_base 3: mod_base = OTHER; note = 2'-O-methylguanosine-3'-phosphate
  modified_base 4: mod_base = OTHER; note = 2'-O-methylcytidine-3'-phosphate
  modified_base 5: mod_base = OTHER; note = 2'-O-methylguanosine-3'-phosphate
  modified_base 6: mod_base = OTHER; note = 2'-O-methylguanosine-3'-phosphate
  modified_base 7: mod_base = OTHER; note = 2'-deoxy-2'-fluoroadenosine-3'-phosphate
  modified_base 8: mod_base = OTHER; note = 2'-O-methyladenosine-3'-phosphate
  modified_base 9: mod_base = OTHER; note = 2'-deoxy-2'-fluoroadenosine-3'-phosphate
  modified_base 10: mod_base = OTHER; note = 2'-deoxy-2'-fluoroguanosine-3'-phosphate
  modified_base 11: mod_base = OTHER; note = 2'-deoxy-2'-fluoroguanosine-3'-phosphate
  modified_base 12: mod_base = OTHER; note = 2'-O-methylcytidine-3'-phosphate
  modified_base 13: mod_base = OTHER; note = 2'-O-methyladenosine-3'-phosphate
  modified_base 14: mod_base = OTHER; note = 2'-O-methylcytidine-3'-phosphate
  modified_base 15: mod_base = OTHER; note = 2'-O-methyluridine-3'-phosphate
  modified_base 16: mod_base = OTHER; note = 2'-O-methylguanosine-3'-phosphate
  modified_base 17: mod_base = OTHER; note = 2'-O-methyladenosine-3'-phosphate
  modified_base 18: mod_base = OTHER; note = 2'-O-methyluridine-3'-phosphate
  modified_base 19: mod_base = OTHER; note = 2'-O-methylguanosine-3'-phosphate
  modified_base 20: mod_base = OTHER; note = 2'-O-methyluridine-3'-phosphate
  modified_base 21: mod_base = OTHER; note = 2'-O-methyluridine-3'-phosphate ((2S,4R)-1-[29-[[2-(acetylamino)-2-deoxy-beta-D-galactopyra nosyl]oxy]-14,14-bis[[3-[[3-[[5-[[2-(acetylamino)-2-deoxy-b eta-D-galactopyranosyl]oxy]-1-oxopentyl]amino]propyl]amino] -3-oxopropoxy]methyl]-1,12,19,25-tetraoxo-16-oxa-13,20,24-t riazanonacos-1-yl]-4-hydroxy-2-pyrrolidinyl)methyl ester
gtgcggaaaggcactgatgtt

SEQ ID NO: 2953 - RNA, 23 nt, synthetic construct
  source 1..23: mol_type = other RNA
  modified_base 1: mod_base = OTHER; note = 2'-O-methyladenosine-3'-phosphorothioate
  modified_base 2: mod_base = OTHER; note = 2'-deoxy-2'-fluoroadenosine-3'-phosphorothioate
  modified_base 3: mod_base = OTHER; note = 2'-O-methylcytidine-3'-phosphate
  modified_base 4: mod_base = OTHER; note = 2'-O-methyladenosine-3'-phosphate
  modified_base 5: mod_base = OTHER; note = 2'-O-methyluridine-3'-phosphate
  modified_base 6: mod_base = OTHER; note = 2'-deoxy-2'-fluorocytidine-3'-phosphate
  modified_base 7: mod_base = OTHER; note = 2'-O-methyladenosine-3'-phosphate
  modified_base 8: mod_base = OTHER; note = 2'-deoxy-2'-fluoroguanosine-3'-phosphate
  modified_base 9: mod_base = OTHER; note = 2'-deoxy-2'-fluorouridine-3'-phosphate
  modified_base 10: mod_base = OTHER; note = 2'-O-methylguanosine-3'-phosphate
  modified_base 11: mod_base = OTHER; note = 2'-O-methylcytidine-3'-phosphate
  modified_base 12: mod_base = OTHER; note = 2'-O-methylcytidine-3'-phosphate
  modified_base 13: mod_base = OTHER; note = 2'-O-methyluridine-3'-phosphate
  modified_base 14: mod_base = OTHER; note = 2'-deoxy-2'-fluorouridine-3'-phosphate
  modified_base 15: mod_base = OTHER; note = 2'-O-methyluridine-3'-phosphate
  modified_base 16: mod_base = OTHER; note = 2'-deoxy-2'-fluorocytidine-3'-phosphate
  modified_base 17: mod_base = OTHER; note = 2'-O-methylcytidine-3'-phosphate
  modified_base 18: mod_base = OTHER; note = 2'-O-methylguanosine-3'-phosphate
  modified_base 19: mod_base = OTHER; note = 2'-O-methylcytidine-3'-phosphate
  modified_base 20: mod_base = OTHER; note = 2'-O-methyladenosine-3'-phosphate
  modified_base 21: mod_base = OTHER; note = 2'-O-methylcytidine-3'-phosphorothioate
  modified_base 22: mod_base = OTHER; note = 2'-O-methyladenosine-3'-phosphorothioate
  modified_base 23: mod_base = OTHER; note = 2'-O-methylcytidine
aacatcagtgcctttccgcacac

SEQ ID NO: 2954 - RNA, 21 nt, synthetic construct
  source 1..21: mol_type = other RNA
  modified_base 1: mod_base = OTHER; note = 2'-O-methylguanosine-3'-phosphorothioate
  modified_base 2: mod_base = OTHER; note = 2'-O-methyluridine-3'-phosphorothioate
  modified_base 3: mod_base = OTHER; note = 2'-O-methylcytidine-3'-phosphate
  modified_base 4: mod_base = OTHER; note = 2'-O-methyladenosine-3'-phosphate
  modified_base 5: mod_base = OTHER; note = 2'-O-methylguanosine-3'-phosphate
  modified_base 6: mod_base = OTHER; note = 2'-O-methylcytidine-3'-phosphate
  modified_base 7: mod_base = OTHER; note = 2'-deoxy-2'-fluoroadenosine-3'-phosphate
  modified_base 8: mod_base = OTHER; note = 2'-O-methyluridine-3'-phosphate
  modified_base 9: mod_base = OTHER; note = 2'-deoxy-2'-fluoroguanosine-3'-phosphate
  modified_base 10: mod_base = OTHER; note = 2'-deoxy-2'-fluorocytidine-3'-phosphate
  modified_base 11: mod_base = OTHER; note = 2'-deoxy-2'-fluorocytidine-3'-phosphate
  modified_base 12: mod_base = OTHER; note = 2'-O-methyladenosine-3'-phosphate
  modified_base 13: mod_base = OTHER; note = 2'-O-methyladenosine-3'-phosphate
  modified_base 14: mod_base = OTHER; note = 2'-O-methyluridine-3'-phosphate
  modified_base 15: mod_base = OTHER; note = 2'-O-methyladenosine-3'-phosphate
  modified_base 16: mod_base = OTHER; note = 2'-O-methyluridine-3'-phosphate
  modified_base 17: mod_base = OTHER; note = 2'-O-methylguanosine-3'-phosphate
  modified_base 18: mod_base = OTHER; note = 2'-O-methyluridine-3'-phosphate
  modified_base 19: mod_base = OTHER; note = 2'-O-methylguanosine-3'-phosphate
  modified_base 20: mod_base = OTHER; note = 2'-O-methyluridine-3'-phosphate
  modified_base 21: mod_base = OTHER; note = 2'-O-methylguanosine-3'-phosphate ((2S,4R)-1-[29-[[2-(acetylamino)-2-deoxy-beta-D-galactopyra nosyl]oxy]-14,14-bis[[3-[[3-[[5-[[2-(acetylamino)-2-deoxy-b eta-D-galactopyranosyl]oxy]-1-oxopentyl]amino]propyl]amino] -3-oxopropoxy]methyl]-1,12,19,25-tetraoxo-16-oxa-13,20,24-t riazanonacos-1-yl]-4-hydroxy-2-pyrrolidinyl)methyl ester
gtcagcatgccaatatgtgtg

SEQ ID NO: 2955 - RNA, 23 nt, synthetic construct
  source 1..23: mol_type = other RNA
  modified_base 1: mod_base = OTHER; note = 2'-O-methylcytidine-3'-phosphorothioate
  modified_base 2: mod_base = OTHER; note = 2'-deoxy-2'-fluoroadenosine-3'-phosphorothioate
  modified_base 3: mod_base = OTHER; note = 2'-O-methylcytidine-3'-phosphate
  modified_base 4: mod_base = OTHER; note = 2'-O-methyladenosine-3'-phosphate
  modified_base 5: mod_base = OTHER; note = 2'-O-methylcytidine-3'-phosphate
  modified_base 6: mod_base = OTHER; note = 2'-deoxy-2'-fluoroadenosine-3'-phosphate
  modified_base 7: mod_base = OTHER; note = 2'-O-methyluridine-3'-phosphate
  modified_base 8: mod_base = OTHER; note = 2'-deoxy-2'-fluoroadenosine-3'-phosphate
  modified_base 9: mod_base = OTHER; note = 2'-deoxy-2'-fluorouridine-3'-phosphate
  modified_base 10: mod_base = OTHER; note = 2'-O-methyluridine-3'-phosphate
  modified_base 11: mod_base = OTHER; note = 2'-O-methylguanosine-3'-phosphate
  modified_base 12: mod_base = OTHER; note = 2'-O-methylguanosine-3'-phosphate
  modified_base 13: mod_base = OTHER; note = 2'-O-methylcytidine-3'-phosphate
  modified_base 14: mod_base = OTHER; note = 2'-deoxy-2'-fluoroadenosine-3'-phosphate
  modified_base 15: mod_base = OTHER; note = 2'-O-methyluridine-3'-phosphate
  modified_base 16: mod_base = OTHER; note = 2'-deoxy-2'-fluoroguanosine-3'-phosphate
  modified_base 17: mod_base = OTHER; note = 2'-O-methylcytidine-3'-phosphate
  modified_base 18: mod_base = OTHER; note = 2'-O-methyluridine-3'-phosphate
  modified_base 19: mod_base = OTHER; note = 2'-O-methylguanosine-3'-phosphate
  modified_base 20: mod_base = OTHER; note = 2'-O-methyladenosine-3'-phosphate
  modified_base 21: mod_base = OTHER; note = 2'-O-methylcytidine-3'-phosphorothioate
  modified_base 22: mod_base = OTHER; note = 2'-O-methylcytidine-3'-phosphorothioate
  modified_base 23: mod_base = OTHER; note = 2'-O-methylcytidine
cacacatattggcatgctgaccc

SEQ ID NO: 2956 - RNA, 21 nt, synthetic construct
  source 1..21: mol_type = other RNA
  modified_base 1: mod_base = OTHER; note = 2'-O-methyluridine-3'-phosphorothioate
  modified_base 2: mod_base = OTHER; note = 2'-O-methylcytidine-3'-phosphorothioate
  modified_base 3: mod_base = OTHER; note = 2'-O-methyladenosine-3'-phosphate
  modified_base 4: mod_base = OTHER; note = 2'-O-methylguanosine-3'-phosphate
  modified_base 5: mod_base = OTHER; note = 2'-O-methylcytidine-3'-phosphate
  modified_base 6: mod_base = OTHER; note = 2'-O-methyladenosine-3'-phosphate
  modified_base 7: mod_base = OTHER; note = 2'-deoxy-2'-fluorouridine-3'-phosphate
  modified_base 8: mod_base = OTHER; note = 2'-O-methylguanosine-3'-phosphate
  modified_base 9: mod_base = OTHER; note = 2'-deoxy-2'-fluorocytidine-3'-phosphate
  modified_base 10: mod_base = OTHER; note = 2'-deoxy-2'-fluorocytidine-3'-phosphate
  modified_base 11: mod_base = OTHER; note = 2'-deoxy-2'-fluoroadenosine-3'-phosphate
  modified_base 12: mod_base = OTHER; note = 2'-O-methyladenosine-3'-phosphate
  modified_base 13: mod_base = OTHER; note = 2'-O-methyluridine-3'-phosphate
  modified_base 14: mod_base = OTHER; note = 2'-O-methyladenosine-3'-phosphate
  modified_base 15: mod_base = OTHER; note = 2'-O-methyluridine-3'-phosphate
  modified_base 16: mod_base = OTHER; note = 2'-O-methylguanosine-3'-phosphate
  modified_base 17: mod_base = OTHER; note = 2'-O-methyluridine-3'-phosphate
  modified_base 18: mod_base = OTHER; note = 2'-O-methylguanosine-3'-phosphate
  modified_base 19: mod_base = OTHER; note = 2'-O-methyluridine-3'-phosphate
  modified_base 20: mod_base = OTHER; note = 2'-O-methylguanosine-3'-phosphate
  modified_base 21: mod_base = OTHER; note = 2'-O-methylguanosine-3'-phosphate ((2S,4R)-1-[29-[[2-(acetylamino)-2-deoxy-beta-D-galactopyra nosyl]oxy]-14,14-bis[[3-[[3-[[5-[[2-(acetylamino)-2-deoxy-b eta-D-galactopyranosyl]oxy]-1-oxopentyl]amino]propyl]amino] -3-oxopropoxy]methyl]-1,12,19,25-tetraoxo-16-oxa-13,20,24-t riazanonacos-1-yl]-4-hydroxy-2-pyrrolidinyl)methyl ester
tcagcatgccaatatgtgtgg

SEQ ID NO: 2957 - RNA, 23 nt, synthetic construct
  source 1..23: mol_type = other RNA
  modified_base 1: mod_base = OTHER; note = 2'-O-methylcytidine-3'-phosphorothioate
  modified_base 2: mod_base = OTHER; note = 2'-deoxy-2'-fluorocytidine-3'-phosphorothioate
  modified_base 3: mod_base = OTHER; note = 2'-O-methyladenosine-3'-phosphate
  modified_base 4: mod_base = OTHER; note = 2'-O-methylcytidine-3'-phosphate
  modified_base 5: mod_base = OTHER; note = 2'-O-methyladenosine-3'-phosphate
  modified_base 6: mod_base = OTHER; note = 2'-deoxy-2'-fluorocytidine-3'-phosphate
  modified_base 7: mod_base = OTHER; note = 2'-O-methyladenosine-3'-phosphate
  modified_base 8: mod_base = OTHER; note = 2'-deoxy-2'-fluorouridine-3'-phosphate
  modified_base 9: mod_base = OTHER; note = 2'-deoxy-2'-fluoroadenosine-3'-phosphate
  modified_base 10: mod_base = OTHER; note = 2'-O-methyluridine-3'-phosphate
  modified_base 11: mod_base = OTHER; note = 2'-O-methyluridine-3'-phosphate
  modified_base 12: mod_base = OTHER; note = 2'-O-methylguanosine-3'-phosphate
  modified_base 13: mod_base = OTHER; note = 2'-O-methylguanosine-3'-phosphate
  modified_base 14: mod_base = OTHER; note = 2'-deoxy-2'-fluorocytidine-3'-phosphate
  modified_base 15: mod_base = OTHER; note = 2'-O-methyladenosine-3'-phosphate
  modified_base 16: mod_base = OTHER; note = 2'-deoxy-2'-fluorouridine-3'-phosphate
  modified_base 17: mod_base = OTHER; note = 2'-O-methylguanosine-3'-phosphate
  modified_base 18: mod_base = OTHER; note = 2'-O-methylcytidine-3'-phosphate
  modified_base 19: mod_base = OTHER; note = 2'-O-methyluridine-3'-phosphate
  modified_base 20: mod_base = OTHER; note = 2'-O-methylguanosine-3'-phosphate
  modified_base 21: mod_base = OTHER; note = 2'-O-methyladenosine-3'-phosphorothioate
  modified_base 22: mod_base = OTHER; note = 2'-O-methylcytidine-3'-phosphorothioate
  modified_base 23: mod_base = OTHER; note = 2'-O-methylcytidine
ccacacatattggcatgctgacc

SEQ ID NO: 2958 - RNA, 21 nt, synthetic construct
  source 1..21: mol_type = other RNA
  modified_base 1: mod_base = OTHER; note = 2'-O-methylguanosine-3'-phosphorothioate
  modified_base 2: mod_base = OTHER; note = 2'-O-methyladenosine-3'-phosphorothioate
  modified_base 3: mod_base = OTHER; note = 2'-O-methylguanosine-3'-phosphate
  modified_base 4: mod_base = OTHER; note = 2'-O-methylguanosine-3'-phosphate
  modified_base 5: mod_base = OTHER; note = 2'-O-methylguanosine-3'-phosphate
  modified_base 6: mod_base = OTHER; note = 2'-O-methyluridine-3'-phosphate
  modified_base 7: mod_base = OTHER; note = 2'-deoxy-2'-fluorocytidine-3'-phosphate
  modified_base 8: mod_base = OTHER; note = 2'-O-methyladenosine-3'-phosphate
  modified_base 9: mod_base = OTHER; note = 2'-deoxy-2'-fluoroguanosine-3'-phosphate
  modified_base 10: mod_base = OTHER; note = 2'-deoxy-2'-fluorocytidine-3'-phosphate
  modified_base 11: mod_base = OTHER; note = 2'-deoxy-2'-fluoroadenosine-3'-phosphate
  modified_base 12: mod_base = OTHER; note = 2'-O-methyluridine-3'-phosphate
  modified_base 13: mod_base = OTHER; note = 2'-O-methylguanosine-3'-phosphate
  modified_base 14: mod_base = OTHER; note = 2'-O-methylcytidine-3'-phosphate
  modified_base 15: mod_base = OTHER; note = 2'-O-methylcytidine-3'-phosphate
  modified_base 16: mod_base = OTHER; note = 2'-O-methyladenosine-3'-phosphate
  modified_base 17: mod_base = OTHER; note = 2'-O-methyladenosine-3'-phosphate
  modified_base 18: mod_base = OTHER; note = 2'-O-methyluridine-3'-phosphate
  modified_base 19: mod_base = OTHER; note = 2'-O-methyladenosine-3'-phosphate
  modified_base 20: mod_base = OTHER; note = 2'-O-methyluridine-3'-phosphate
  modified_base 21: mod_base = OTHER; note = 2'-O-methylguanosine-3'-phosphate ((2S,4R)-1-[29-[[2-(acetylamino)-2-deoxy-beta-D-galactopyra nosyl]oxy]-14,14-bis[[3-[[3-[[5-[[2-(acetylamino)-2-deoxy-b eta-D-galactopyranosyl]oxy]-1-oxopentyl]amino]propyl]amino] -3-oxopropoxy]methyl]-1,12,19,25-tetraoxo-16-oxa-13,20,24-t riazanonacos-1-yl]-4-hydroxy-2-pyrrolidinyl)methyl ester
gagggtcagcatgccaatatg

SEQ ID NO: 2959 - RNA, 23 nt, synthetic construct
  source 1..23: mol_type = other RNA
  modified_base 1: mod_base = OTHER; note = 2'-O-methylcytidine-3'-phosphorothioate
  modified_base 2: mod_base = OTHER; note = 2'-deoxy-2'-fluoroadenosine-3'-phosphorothioate
  modified_base 3: mod_base = OTHER; note = 2'-O-methyluridine-3'-phosphate
  modified_base 4: mod_base = OTHER; note = 2'-O-methyladenosine-3'-phosphate
  modified_base 5: mod_base = OTHER; note = 2'-O-methyluridine-3'-phosphate
  modified_base 6: mod_base = OTHER; note = 2'-deoxy-2'-fluorouridine-3'-phosphate
  modified_base 7: mod_base = OTHER; note = 2'-O-methylguanosine-3'-phosphate
  modified_base 8: mod_base = OTHER; note = 2'-deoxy-2'-fluoroguanosine-3'-phosphate
  modified_base 9: mod_base = OTHER; note = 2'-deoxy-2'-fluorocytidine-3'-phosphate
  modified_base 10: mod_base = OTHER; note = 2'-O-methyladenosine-3'-phosphate
  modified_base 11: mod_base = OTHER; note = 2'-O-methyluridine-3'-phosphate
  modified_base 12: mod_base = OTHER; note = 2'-O-methylguanosine-3'-phosphate
  modified_base 13: mod_base = OTHER; note = 2'-O-methylcytidine-3'-phosphate
  modified_base 14: mod_base = OTHER; note = 2'-deoxy-2'-fluorouridine-3'-phosphate
  modified_base 15: mod_base = OTHER; note = 2'-O-methylguanosine-3'-phosphate
  modified_base 16: mod_base = OTHER; note = 2'-deoxy-2'-fluoroadenosine-3'-phosphate
  modified_base 17: mod_base = OTHER; note = 2'-O-methylcytidine-3'-phosphate
  modified_base 18: mod_base = OTHER; note = 2'-O-methylcytidine-3'-phosphate
  modified_base 19: mod_base = OTHER; note = 2'-O-methylcytidine-3'-phosphate
  modified_base 20: mod_base = OTHER; note = 2'-O-methyluridine-3'-phosphate
  modified_base 21: mod_base = OTHER; note = 2'-O-methylcytidine-3'-phosphorothioate
  modified_base 22: mod_base = OTHER; note = 2'-O-methyluridine-3'-phosphorothioate
  modified_base 23: mod_base = OTHER; note = 2'-O-methylguanosine
catattggcatgctgaccctctg

SEQ ID NO: 2960 - RNA, 21 nt, synthetic construct
  source 1..21: mol_type = other RNA
  modified_base 1: mod_base = OTHER; note = 2'-O-methyladenosine-3'-phosphorothioate
  modified_base 2: mod_base = OTHER; note = 2'-O-methylguanosine-3'-phosphorothioate
  modified_base 3: mod_base = OTHER; note = 2'-O-methyladenosine-3'-phosphate
  modified_base 4: mod_base = OTHER; note = 2'-O-methylguanosine-3'-phosphate
  modified_base 5: mod_base = OTHER; note = 2'-O-methylguanosine-3'-phosphate
  modified_base 6: mod_base = OTHER; note = 2'-O-methylguanosine-3'-phosphate
  modified_base 7: mod_base = OTHER; note = 2'-deoxy-2'-fluorouridine-3'-phosphate
  modified_base 8: mod_base = OTHER; note = 2'-O-methylcytidine-3'-phosphate
  modified_base 9: mod_base = OTHER; note = 2'-deoxy-2'-fluoroadenosine-3'-phosphate
  modified_base 10: mod_base = OTHER; note = 2'-deoxy-2'-fluoroguanosine-3'-phosphate
  modified_base 11: mod_base = OTHER; note = 2'-deoxy-2'-fluorocytidine-3'-phosphate
  modified_base 12: mod_base = OTHER; note = 2'-O-methyladenosine-3'-phosphate
  modified_base 13: mod_base = OTHER; note = 2'-O-methyluridine-3'-phosphate
  modified_base 14: mod_base = OTHER; note = 2'-O-methylguanosine-3'-phosphate
  modified_base 15: mod_base = OTHER; note = 2'-O-methylcytidine-3'-phosphate
  modified_base 16: mod_base = OTHER; note = 2'-O-methylcytidine-3'-phosphate
  modified_base 17: mod_base = OTHER; note = 2'-O-methyladenosine-3'-phosphate
  modified_base 18: mod_base = OTHER; note = 2'-O-methyladenosine-3'-phosphate
  modified_base 19: mod_base = OTHER; note = 2'-O-methyluridine-3'-phosphate
  modified_base 20: mod_base = OTHER; note = 2'-O-methyladenosine-3'-phosphate
  modified_base 21: mod_base = OTHER; note = 2'-O-methyluridine-3'-phosphate ((2S,4R)-1-[29-[[2-(acetylamino)-2-deoxy-beta-D-galactopyra nosyl]oxy]-14,14-bis[[3-[[3-[[5-[[2-(acetylamino)-2-deoxy-b eta-D-galactopyranosyl]oxy]-1-oxopentyl]amino]propyl]amino] -3-oxopropoxy]methyl]-1,12,19,25-tetraoxo-16-oxa-13,20,24-t riazanonacos-1-yl]-4-hydroxy-2-pyrrolidinyl)methyl ester
agagggtcagcatgccaatat

SEQ ID NO: 2961 - RNA, 23 nt, synthetic construct
  source 1..23: mol_type = other RNA
  modified_base 1: mod_base = OTHER; note = 2'-O-methyladenosine-3'-phosphorothioate
  modified_base 2: mod_base = OTHER; note = 2'-deoxy-2'-fluorouridine-3'-phosphorothioate
  modified_base 3: mod_base = OTHER; note = 2'-O-methyladenosine-3'-phosphate
  modified_base 4: mod_base = OTHER; note = 2'-O-methyluridine-3'-phosphate
  modified_base 5: mod_base = OTHER; note = 2'-O-methyluridine-3'-phosphate
  modified_base 6: mod_base = OTHER; note = 2'-deoxy-2'-fluoroguanosine-3'-phosphate
  modified_base 7: mod_base = OTHER; note = 2'-O-methylguanosine-3'-phosphate
  modified_base 8: mod_base = OTHER; note = 2'-deoxy-2'-fluorocytidine-3'-phosphate
  modified_base 9: mod_base = OTHER; note = 2'-deoxy-2'-fluoroadenosine-3'-phosphate
  modified_base 10: mod_base = OTHER; note = 2'-O-methyluridine-3'-phosphate
  modified_base 11: mod_base = OTHER; note = 2'-O-methylguanosine-3'-phosphate
  modified_base 12: mod_base = OTHER; note = 2'-O-methylcytidine-3'-phosphate
  modified_base 13: mod_base = OTHER; note = 2'-O-methyluridine-3'-phosphate
  modified_base 14: mod_base = OTHER; note = 2'-deoxy-2'-fluoroguanosine-3'-phosphate
  modified_base 15: mod_base = OTHER; note = 2'-O-methyladenosine-3'-phosphate
  modified_base 16: mod_base = OTHER; note = 2'-deoxy-2'-fluorocytidine-3'-phosphate
  modified_base 17: mod_base = OTHER; note = 2'-O-methylcytidine-3'-phosphate
  modified_base 18: mod_base = OTHER; note = 2'-O-methylcytidine-3'-phosphate
  modified_base 19: mod_base = OTHER; note = 2'-O-methyluridine-3'-phosphate
  modified_base 20: mod_base = OTHER; note = 2'-O-methylcytidine-3'-phosphate
  modified_base 21: mod_base = OTHER; note = 2'-O-methyluridine-3'-phosphorothioate
  modified_base 22: mod_base = OTHER; note = 2'-O-methylguanosine-3'-phosphorothioate
  modified_base 23: mod_base = OTHER; note = 2'-O-methyluridine
atattggcatgctgaccctctgt

SEQ ID NO: 2962 - RNA, 21 nt, synthetic construct
  source 1..21: mol_type = other RNA
  modified_base 1: mod_base = OTHER; note = 2'-O-methylguanosine-3'-phosphorothioate
  modified_base 2: mod_base = OTHER; note = 2'-O-methyladenosine-3'-phosphorothioate
  modified_base 3: mod_base = OTHER; note = 2'-O-methyluridine-3'-phosphate
  modified_base 4: mod_base = OTHER; note = 2'-O-methylguanosine-3'-phosphate
  modified_base 5: mod_base = OTHER; note = 2'-O-methylcytidine-3'-phosphate
  modified_base 6: mod_base = OTHER; note = 2'-O-methyluridine-3'-phosphate
  modified_base 7: mod_base = OTHER; note = 2'-deoxy-2'-fluorocytidine-3'-phosphate
  modified_base 8: mod_base = OTHER; note = 2'-O-methylcytidine-3'-phosphate
  modified_base 9: mod_base = OTHER; note = 2'-deoxy-2'-fluoroguanosine-3'-phosphate
  modified_base 10: mod_base = OTHER; note = 2'-deoxy-2'-fluoroguanosine-3'-phosphate
  modified_base 11: mod_base = OTHER; note = 2'-deoxy-2'-fluoroadenosine-3'-phosphate
  modified_base 12: mod_base = OTHER; note = 2'-O-methyladenosine-3'-phosphate
  modified_base 13: mod_base = OTHER; note = 2'-O-methyluridine-3'-phosphate
  modified_base 14: mod_base = OTHER; note = 2'-O-methylguanosine-3'-phosphate
  modified_base 15: mod_base = OTHER; note = 2'-O-methyluridine-3'-phosphate
  modified_base 16: mod_base = OTHER; note = 2'-O-methyluridine-3'-phosphate
  modified_base 17: mod_base = OTHER; note = 2'-O-methylguanosine-3'-phosphate
  modified_base 18: mod_base = OTHER; note = 2'-O-methylcytidine-3'-phosphate
  modified_base 19: mod_base = OTHER; note = 2'-O-methyluridine-3'-phosphate
  modified_base 20: mod_base = OTHER; note = 2'-O-methylguanosine-3'-phosphate
  modified_base 21: mod_base = OTHER; note = 2'-O-methyladenosine-3'-phosphate ((2S,4R)-1-[29-[[2-(acetylamino)-2-deoxy-beta-D-galactopyra nosyl]oxy]-14,14-bis[[3-[[3-[[5-[[2-(acetylamino)-2-deoxy-b eta-D-galactopyranosyl]oxy]-1-oxopentyl]amino]propyl]amino] -3-oxopropoxy]methyl]-1,12,19,25-tetraoxo-16-oxa-13,20,24-t riazanonacos-1-yl]-4-hydroxy-2-pyrrolidinyl)methyl ester
gatgctccggaatgttgctga

SEQ ID NO: 2963 - RNA, 23 nt, synthetic construct
  source 1..23: mol_type = other RNA
  modified_base 1: mod_base = OTHER; note = 2'-O-methyluridine-3'-phosphorothioate
  modified_base 2: mod_base = OTHER; note = 2'-deoxy-2'-fluorocytidine-3'-phosphorothioate
  modified_base 3: mod_base = OTHER; note = 2'-O-methyladenosine-3'-phosphate
  modified_base 4: mod_base = OTHER; note = 2'-O-methylguanosine-3'-phosphate
  modified_base 5: mod_base = OTHER; note = 2'-O-methylcytidine-3'-phosphate
  modified_base 6: mod_base = OTHER; note = 2'-deoxy-2'-fluoroadenosine-3'-phosphate
  modified_base 7: mod_base = OTHER; note = 2'-O-methyladenosine-3'-phosphate
  modified_base 8: mod_base = OTHER; note = 2'-deoxy-2'-fluorocytidine-3'-phosphate
  modified_base 9: mod_base = OTHER; note = 2'-deoxy-2'-fluoroadenosine-3'-phosphate
  modified_base 10: mod_base = OTHER; note = 2'-O-methyluridine-3'-phosphate
  modified_base 11: mod_base = OTHER; note = 2'-O-methyluridine-3'-phosphate
  modified_base 12: mod_base = OTHER; note = 2'-O-methylcytidine-3'-phosphate
  modified_base 13: mod_base = OTHER; note = 2'-O-methylcytidine-3'-phosphate
  modified_base 14: mod_base = OTHER; note = 2'-deoxy-2'-fluoroguanosine-3'-phosphate
  modified_base 15: mod_base = OTHER; note = 2'-O-methylguanosine-3'-phosphate
  modified_base 16: mod_base = OTHER; note = 2'-deoxy-2'-fluoroadenosine-3'-phosphate
  modified_base 17: mod_base = OTHER; note = 2'-O-methylguanosine-3'-phosphate
  modified_base 18: mod_base = OTHER; note = 2'-O-methylcytidine-3'-phosphate
  modified_base 19: mod_base = OTHER; note = 2'-O-methyladenosine-3'-phosphate
  modified_base 20: mod_base = OTHER; note = 2'-O-methyluridine-3'-phosphate
  modified_base 21: mod_base = OTHER; note = 2'-O-methylcytidine-3'-phosphorothioate
  modified_base 22: mod_base = OTHER; note = 2'-O-methylcytidine-3'-phosphorothioate
  modified_base 23: mod_base = OTHER; note = 2'-O-methyluridine
tcagcaacattccggagcatcct

SEQ ID NO: 2964 - RNA, 21 nt, synthetic construct
  source 1..21: mol_type = other RNA
  modified_base 1: mod_base = OTHER; note = 2'-O-methyladenosine-3'-phosphorothioate
  modified_base 2: mod_base = OTHER; note = 2'-O-methyluridine-3'-phosphorothioate
  modified_base 3: mod_base = OTHER; note = 2'-O-methylguanosine-3'-phosphate
  modified_base 4: mod_base = OTHER; note = 2'-O-methylcytidine-3'-phosphate
  modified_base 5: mod_base = OTHER; note = 2'-O-methyluridine-3'-phosphate
  modified_base 6: mod_base = OTHER; note = 2'-O-methylcytidine-3'-phosphate
  modified_base 7: mod_base = OTHER; note = 2'-deoxy-2'-fluorocytidine-3'-phosphate
  modified_base 8: mod_base = OTHER; note = 2'-O-methylguanosine-3'-phosphate
  modified_base 9: mod_base = OTHER; note = 2'-deoxy-2'-fluoroguanosine-3'-phosphate
  modified_base 10: mod_base = OTHER; note = 2'-deoxy-2'-fluoroadenosine-3'-phosphate
  modified_base 11: mod_base = OTHER; note = 2'-deoxy-2'-fluoroadenosine-3'-phosphate
  modified_base 12: mod_base = OTHER; note = 2'-O-methyluridine-3'-phosphate
  modified_base 13: mod_base = OTHER; note = 2'-O-methylguanosine-3'-phosphate
  modified_base 14: mod_base = OTHER; note = 2'-O-methyluridine-3'-phosphate
  modified_base 15: mod_base = OTHER; note = 2'-O-methyluridine-3'-phosphate
  modified_base 16: mod_base = OTHER; note = 2'-O-methylguanosine-3'-phosphate
  modified_base 17: mod_base = OTHER; note = 2'-O-methylcytidine-3'-phosphate
  modified_base 18: mod_base = OTHER; note = 2'-O-methyluridine-3'-phosphate
  modified_base 19: mod_base = OTHER; note = 2'-O-methylguanosine-3'-phosphate
  modified_base 20: mod_base = OTHER; note = 2'-O-methyladenosine-3'-phosphate
  modified_base 21: mod_base = OTHER; note = 2'-O-methyladenosine-3'-phosphate ((2S,4R)-1-[29-[[2-(acetylamino)-2-deoxy-beta-D-galactopyra nosyl]oxy]-14,14-bis[[3-[[3-[[5-[[2-(acetylamino)-2-deoxy-b eta-D-galactopyranosyl]oxy]-1-oxopentyl]amino]propyl]amino] -3-oxopropoxy]methyl]-1,12,19,25-tetraoxo-16-oxa-13,20,24-t riazanonacos-1-yl]-4-hydroxy-2-pyrrolidinyl)methyl ester
atgctccggaatgttgctgaa

SEQ ID NO: 2965 - RNA, 23 nt, synthetic construct
  source 1..23: mol_type = other RNA
  modified_base 1: mod_base = OTHER; note = 2'-O-methyluridine-3'-phosphorothioate
  modified_base 2: mod_base = OTHER; note = 2'-deoxy-2'-fluorouridine-3'-phosphorothioate
  modified_base 3: mod_base = OTHER; note = 2'-O-methylcytidine-3'-phosphate
  modified_base 4: mod_base = OTHER; note = 2'-O-methyladenosine-3'-phosphate
  modified_base 5: mod_base = OTHER; note = 2'-O-methylguanosine-3'-phosphate
  modified_base 6: mod_base = OTHER; note = 2'-deoxy-2'-fluorocytidine-3'-phosphate
  modified_base 7: mod_base = OTHER; note = 2'-O-methyladenosine-3'-phosphate
  modified_base 8: mod_base = OTHER; note = 2'-deoxy-2'-fluoroadenosine-3'-phosphate
  modified_base 9: mod_base = OTHER; note = 2'-deoxy-2'-fluorocytidine-3'-phosphate
  modified_base 10: mod_base = OTHER; note = 2'-O-methyladenosine-3'-phosphate
  modified_base 11: mod_base = OTHER; note = 2'-O-methyluridine-3'-phosphate
  modified_base 12: mod_base = OTHER; note = 2'-O-methyluridine-3'-phosphate
  modified_base 13: mod_base = OTHER; note = 2'-O-methylcytidine-3'-phosphate
  modified_base 14: mod_base = OTHER; note = 2'-deoxy-2'-fluorocytidine-3'-phosphate
  modified_base 15: mod_base = OTHER; note = 2'-O-methylguanosine-3'-phosphate
  modified_base 16: mod_base = OTHER; note = 2'-deoxy-2'-fluoroguanosine-3'-phosphate
  modified_base 17: mod_base = OTHER; note = 2'-O-methyladenosine-3'-phosphate
  modified_base 18: mod_base = OTHER; note = 2'-O-methylguanosine-3'-phosphate
  modified_base 19: mod_base = OTHER; note = 2'-O-methylcytidine-3'-phosphate
  modified_base 20: mod_base = OTHER; note = 2'-O-methyladenosine-3'-phosphate
  modified_base 21: mod_base = OTHER; note = 2'-O-methyluridine-3'-phosphorothioate
  modified_base 22: mod_base = OTHER; note = 2'-O-methylcytidine-3'-phosphorothioate
  modified_base 23: mod_base = OTHER; note = 2'-O-methylcytidine
ttcagcaacattccggagcatcc

SEQ ID NO: 2966 - RNA, 21 nt, synthetic construct
  source 1..21: mol_type = other RNA
  modified_base 1: mod_base = OTHER; note = 2'-O-methylcytidine-3'-phosphorothioate
  modified_base 2: mod_base = OTHER; note = 2'-O-methyladenosine-3'-phosphorothioate
  modified_base 3: mod_base = OTHER; note = 2'-O-methyladenosine-3'-phosphate
  modified_base 4: mod_base = OTHER; note = 2'-O-methylguanosine-3'-phosphate
  modified_base 5: mod_base = OTHER; note = 2'-O-methylguanosine-3'-phosphate
  modified_base 6: mod_base = OTHER; note = 2'-O-methyladenosine-3'-phosphate
  modified_base 7: mod_base = OTHER; note = 2'-deoxy-2'-fluorouridine-3'-phosphate
  modified_base 8: mod_base = OTHER; note = 2'-O-methylguanosine-3'-phosphate
  modified_base 9: mod_base = OTHER; note = 2'-deoxy-2'-fluorocytidine-3'-phosphate
  modified_base 10: mod_base = OTHER; note = 2'-deoxy-2'-fluorouridine-3'-phosphate
  modified_base 11: mod_base = OTHER; note = 2'-deoxy-2'-fluorocytidine-3'-phosphate
  modified_base 12: mod_base = OTHER; note = 2'-O-methylcytidine-3'-phosphate
  modified_base 13: mod_base = OTHER; note = 2'-O-methylguanosine-3'-phosphate
  modified_base 14: mod_base = OTHER; note = 2'-O-methylguanosine-3'-phosphate
  modified_base 15: mod_base = OTHER; note = 2'-O-methyladenosine-3'-phosphate
  modified_base 16: mod_base = OTHER; note = 2'-O-methyladenosine-3'-phosphate
  modified_base 17: mod_base = OTHER; note = 2'-O-methyluridine-3'-phosphate
  modified_base 18: mod_base = OTHER; note = 2'-O-methylguanosine-3'-phosphate
  modified_base 19: mod_base = OTHER; note = 2'-O-methyluridine-3'-phosphate
  modified_base 20: mod_base = OTHER; note = 2'-O-methyluridine-3'-phosphate
  modified_base 21: mod_base = OTHER; note = 2'-O-methylguanosine-3'-phosphate ((2S,4R)-1-[29-[[2-(acetylamino)-2-deoxy-beta-D-galactopyra nosyl]oxy]-14,14-bis[[3-[[3-[[5-[[2-(acetylamino)-2-deoxy-b eta-D-galactopyranosyl]oxy]-1-oxopentyl]amino]propyl]amino] -3-oxopropoxy]methyl]-1,12,19,25-tetraoxo-16-oxa-13,20,24-t riazanonacos-1-yl]-4-hydroxy-2-pyrrolidinyl)methyl ester
caaggatgctccggaatgttg

SEQ ID NO: 2967 - RNA, 23 nt, synthetic construct
  source 1..23: mol_type = other RNA
  modified_base 1: mod_base = OTHER; note = 2'-O-methylcytidine-3'-phosphorothioate
  modified_base 2: mod_base = OTHER; note = 2'-deoxy-2'-fluoroadenosine-3'-phosphorothioate
  modified_base 3: mod_base = OTHER; note = 2'-O-methyladenosine-3'-phosphate
  modified_base 4: mod_base = OTHER; note = 2'-O-methylcytidine-3'-phosphate
  modified_base 5: mod_base = OTHER; note = 2'-O-methyladenosine-3'-phosphate
  modified_base 6: mod_base = OTHER; note = 2'-deoxy-2'-fluorouridine-3'-phosphate
  modified_base 7: mod_base = OTHER; note = 2'-O-methyluridine-3'-phosphate
  modified_base 8: mod_base = OTHER; note = 2'-deoxy-2'-fluorocytidine-3'-phosphate
  modified_base 9: mod_base = OTHER; note = 2'-deoxy-2'-fluorocytidine-3'-phosphate
  modified_base 10: mod_base = OTHER; note = 2'-O-methylguanosine-3'-phosphate
  modified_base 11: mod_base = OTHER; note = 2'-O-methylguanosine-3'-phosphate
  modified_base 12: mod_base = OTHER; note = 2'-O-methyladenosine-3'-phosphate
  modified_base 13: mod_base = OTHER; note = 2'-O-methylguanosine-3'-phosphate
  modified_base 14: mod_base = OTHER; note = 2'-deoxy-2'-fluorocytidine-3'-phosphate
  modified_base 15: mod_base = OTHER; note = 2'-O-methyladenosine-3'-phosphate
  modified_base 16: mod_base = OTHER; note = 2'-deoxy-2'-fluorouridine-3'-phosphate
  modified_base 17: mod_base = OTHER; note = 2'-O-methylcytidine-3'-phosphate
  modified_base 18: mod_base = OTHER; note = 2'-O-methylcytidine-3'-phosphate
  modified_base 19: mod_base = OTHER; note = 2'-O-methyluridine-3'-phosphate
  modified_base 20: mod_base = OTHER; note = 2'-O-methyluridine-3'-phosphate
  modified_base 21: mod_base = OTHER; note = 2'-O-methylguanosine-3'-phosphorothioate
  modified_base 22: mod_base = OTHER; note = 2'-O-methylguanosine-3'-phosphorothioate
  modified_base 23: mod_base = OTHER; note = 2'-O-methyladenosine
caacattccggagcatccttgga

SEQ ID NO: 2968 - RNA, 21 nt, synthetic construct
  source 1..21: mol_type = other RNA
  modified_base 1: mod_base = OTHER; note = 2'-O-methylcytidine-3'-phosphorothioate
  modified_base 2: mod_base = OTHER; note = 2'-O-methylcytidine-3'-phosphorothioate
  modified_base 3: mod_base = OTHER; note = 2'-O-methyladenosine-3'-phosphate
  modified_base 4: mod_base = OTHER; note = 2'-O-methyladenosine-3'-phosphate
  modified_base 5: mod_base = OTHER; note = 2'-O-methylguanosine-3'-phosphate
  modified_base 6: mod_base = OTHER; note = 2'-O-methylguanosine-3'-phosphate
  modified_base 7: mod_base = OTHER; note = 2'-deoxy-2'-fluoroadenosine-3'-phosphate
  modified_base 8: mod_base = OTHER; note = 2'-O-methyluridine-3'-phosphate
  modified_base 9: mod_base = OTHER; note = 2'-deoxy-2'-fluoroguanosine-3'-phosphate
  modified_base 10: mod_base = OTHER; note = 2'-deoxy-2'-fluorocytidine-3'-phosphate
  modified_base 11: mod_base = OTHER; note = 2'-deoxy-2'-fluorouridine-3'-phosphate
  modified_base 12: mod_base = OTHER; note = 2'-O-methylcytidine-3'-phosphate
  modified_base 13: mod_base = OTHER; note = 2'-O-methylcytidine-3'-phosphate
  modified_base 14: mod_base = OTHER; note = 2'-O-methylguanosine-3'-phosphate
  modified_base 15: mod_base = OTHER; note = 2'-O-methylguanosine-3'-phosphate
  modified_base 16: mod_base = OTHER; note = 2'-O-methyladenosine-3'-phosphate
  modified_base 17: mod_base = OTHER; note = 2'-O-methyladenosine-3'-phosphate
  modified_base 18: mod_base = OTHER; note = 2'-O-methyluridine-3'-phosphate
  modified_base 19: mod_base = OTHER; note = 2'-O-methylguanosine-3'-phosphate
  modified_base 20: mod_base = OTHER; note = 2'-O-methyluridine-3'-phosphate
  modified_base 21: mod_base = OTHER; note = 2'-O-methyluridine-3'-phosphate ((2S,4R)-1-[29-[[2-(acetylamino)-2-deoxy-beta-D-galactopyra nosyl]oxy]-14,14-bis[[3-[[3-[[5-[[2-(acetylamino)-2-deoxy-b eta-D-galactopyranosyl]oxy]-1-oxopentyl]amino]propyl]amino] -3-oxopropoxy]methyl]-1,12,19,25-tetraoxo-16-oxa-13,20,24-t riazanonacos-1-yl]-4-hydroxy-2-pyrrolidinyl)methyl ester
ccaaggatgctccggaatgtt

SEQ ID NO: 2969 - RNA, 23 nt, synthetic construct
  source 1..23: mol_type = other RNA
  modified_base 1: mod_base = OTHER; note = 2'-O-methyladenosine-3'-phosphorothioate
  modified_base 2: mod_base = OTHER; note = 2'-deoxy-2'-fluoroadenosine-3'-phosphorothioate
  modified_base 3: mod_base = OTHER; note = 2'-O-methylcytidine-3'-phosphate
  modified_base 4: mod_base = OTHER; note = 2'-O-methyladenosine-3'-phosphate
  modified_base 5: mod_base = OTHER; note = 2'-O-methyluridine-3'-phosphate
  modified_base 6: mod_base = OTHER; note = 2'-deoxy-2'-fluorouridine-3'-phosphate
  modified_base 7: mod_base = OTHER; note = 2'-O-methylcytidine-3'-phosphate
  modified_base 8: mod_base = OTHER; note = 2'-deoxy-2'-fluorocytidine-3'-phosphate
  modified_base 9: mod_base = OTHER; note = 2'-deoxy-2'-fluoroguanosine-3'-phosphate
  modified_base 10: mod_base = OTHER; note = 2'-O-methylguanosine-3'-phosphate
  modified_base 11: mod_base = OTHER; note = 2'-O-methyladenosine-3'-phosphate
  modified_base 12: mod_base = OTHER; note = 2'-O-methylguanosine-3'-phosphate
  modified_base 13: mod_base = OTHER; note = 2'-O-methylcytidine-3'-phosphate
  modified_base 14: mod_base = OTHER; note = 2'-deoxy-2'-fluoroadenosine-3'-phosphate
  modified_base 15: mod_base = OTHER; note = 2'-O-methyluridine-3'-phosphate
  modified_base 16: mod_base = OTHER; note = 2'-deoxy-2'-fluorocytidine-3'-phosphate
  modified_base 17: mod_base = OTHER; note = 2'-O-methylcytidine-3'-phosphate
  modified_base 18: mod_base = OTHER; note = 2'-O-methyluridine-3'-phosphate
  modified_base 19: mod_base = OTHER; note = 2'-O-methyluridine-3'-phosphate
  modified_base 20: mod_base = OTHER; note = 2'-O-methylguanosine-3'-phosphate
  modified_base 21: mod_base = OTHER; note = 2'-O-methylguanosine-3'-phosphorothioate
  modified_base 22: mod_base = OTHER; note = 2'-O-methyladenosine-3'-phosphorothioate
  modified_base 23: mod_base = OTHER; note = 2'-O-methyluridine
aacattccggagcatccttggat

SEQ ID NO: 2970 - RNA, 21 nt, synthetic construct
  source 1..21: mol_type = other RNA
  modified_base 1: mod_base = OTHER; note = 2'-O-methylguanosine-3'-phosphorothioate
  modified_base 2: mod_base = OTHER; note = 2'-O-methylcytidine-3'-phosphorothioate
  modified_base 3: mod_base = OTHER; note = 2'-O-methylguanosine-3'-phosphate
  modified_base 4: mod_base = OTHER; note = 2'-O-methyluridine-3'-phosphate
  modified_base 5: mod_base = OTHER; note = 2'-O-methyladenosine-3'-phosphate
  modified_base 6: mod_base = OTHER; note = 2'-O-methyladenosine-3'-phosphate
  modified_base 7: mod_base = OTHER; note = 2'-deoxy-2'-fluorocytidine-3'-phosphate
  modified_base 8: mod_base = OTHER; note = 2'-O-methyladenosine-3'-phosphate
  modified_base 9: mod_base = OTHER; note = 2'-deoxy-2'-fluoroguanosine-3'-phosphate
  modified_base 10: mod_base = OTHER; note = 2'-deoxy-2'-fluoroadenosine-3'-phosphate
  modified_base 11: mod_base = OTHER; note = 2'-deoxy-2'-fluorouridine-3'-phosphate
  modified_base 12: mod_base = OTHER; note = 2'-O-methyluridine-3'-phosphate
  modified_base 13: mod_base = OTHER; note = 2'-O-methylcytidine-3'-phosphate
  modified_base 14: mod_base = OTHER; note = 2'-O-methyladenosine-3'-phosphate
  modified_base 15: mod_base = OTHER; note = 2'-O-methyladenosine-3'-phosphate
  modified_base 16: mod_base = OTHER; note = 2'-O-methyladenosine-3'-phosphate
  modified_base 17: mod_base = OTHER; note = 2'-O-methylcytidine-3'-phosphate
  modified_base 18: mod_base = OTHER; note = 2'-O-methyluridine-3'-phosphate
  modified_base 19: mod_base = OTHER; note = 2'-O-methylguanosine-3'-phosphate
  modified_base 20: mod_base = OTHER; note = 2'-O-methylcytidine-3'-phosphate
  modified_base 21: mod_base = OTHER; note = 2'-O-methylcytidine-3'-phosphate ((2S,4R)-1-[29-[[2-(acetylamino)-2-deoxy-beta-D-galactopyra nosyl]oxy]-14,14-bis[[3-[[3-[[5-[[2-(acetylamino)-2-deoxy-b eta-D-galactopyranosyl]oxy]-1-oxopentyl]amino]propyl]amino] -3-oxopropoxy]methyl]-1,12,19,25-tetraoxo-16-oxa-13,20,24-t riazanonacos-1-yl]-4-hydroxy-2-pyrrolidinyl)methyl ester
gcgtaacagattcaaactgcc

SEQ ID NO: 2971 - RNA, 23 nt, synthetic construct
  source 1..23: mol_type = other RNA
  modified_base 1: mod_base = OTHER; note = 2'-O-methylguanosine-3'-phosphorothioate
  modified_base 2: mod_base = OTHER; note = 2'-deoxy-2'-fluoroguanosine-3'-phosphorothioate
  modified_base 3: mod_base = OTHER; note = 2'-O-methylcytidine-3'-phosphate
  modified_base 4: mod_base = OTHER; note = 2'-O-methyladenosine-3'-phosphate
  modified_base 5: mod_base = OTHER; note = 2'-O-methylguanosine-3'-phosphate
  modified_base 6: mod_base = OTHER; note = 2'-deoxy-2'-fluorouridine-3'-phosphate
  modified_base 7: mod_base = OTHER; note = 2'-O-methyluridine-3'-phosphate
  modified_base 8: mod_base = OTHER; note = 2'-deoxy-2'-fluorouridine-3'-phosphate
  modified_base 9: mod_base = OTHER; note = 2'-deoxy-2'-fluoroguanosine-3'-phosphate
  modified_base 10: mod_base = OTHER; note = 2'-O-methyladenosine-3'-phosphate
  modified_base 11: mod_base = OTHER; note = 2'-O-methyladenosine-3'-phosphate
  modified_base 12: mod_base = OTHER; note = 2'-O-methyluridine-3'-phosphate
  modified_base 13: mod_base = OTHER; note = 2'-O-methylcytidine-3'-phosphate
  modified_base 14: mod_base = OTHER; note = 2'-deoxy-2'-fluorouridine-3'-phosphate
  modified_base 15: mod_base = OTHER; note = 2'-O-methylguanosine-3'-phosphate
  modified_base 16: mod_base = OTHER; note = 2'-deoxy-2'-fluorouridine-3'-phosphate
  modified_base 17: mod_base = OTHER; note = 2'-O-methyluridine-3'-phosphate
  modified_base 18: mod_base = OTHER; note = 2'-O-methyladenosine-3'-phosphate
  modified_base 19: mod_base = OTHER; note = 2'-O-methylcytidine-3'-phosphate
  modified_base 20: mod_base = OTHER; note = 2'-O-methylguanosine-3'-phosphate
  modified_base 21: mod_base = OTHER; note = 2'-O-methylcytidine-3'-phosphorothioate
  modified_base 22: mod_base = OTHER; note = 2'-O-methyladenosine-3'-phosphorothioate
  modified_base 23: mod_base = OTHER; note = 2'-O-methylcytidine
ggcagtttgaatctgttacgcac

SEQ ID NO: 2972 - RNA, 21 nt, synthetic construct
  source 1..21: mol_type = other RNA
  modified_base 1: mod_base = OTHER; note = 2'-O-methylcytidine-3'-phosphorothioate
  modified_base 2: mod_base = OTHER; note = 2'-O-methylguanosine-3'-phosphorothioate
  modified_base 3: mod_base = OTHER; note = 2'-O-methyluridine-3'-phosphate
  modified_base 4: mod_base = OTHER; note = 2'-O-methyladenosine-3'-phosphate
  modified_base 5: mod_base = OTHER; note = 2'-O-methyladenosine-3'-phosphate
  modified_base 6: mod_base = OTHER; note = 2'-O-methylcytidine-3'-phosphate
  modified_base 7: mod_base = OTHER; note = 2'-deoxy-2'-fluoroadenosine-3'-phosphate
  modified_base 8: mod_base = OTHER; note = 2'-O-methylguanosine-3'-phosphate
  modified_base 9: mod_base = OTHER; note = 2'-deoxy-2'-fluoroadenosine-3'-phosphate
  modified_base 10: mod_base = OTHER; note = 2'-deoxy-2'-fluorouridine-3'-phosphate
  modified_base 11: mod_base = OTHER; note = 2'-deoxy-2'-fluorouridine-3'-phosphate
  modified_base 12: mod_base = OTHER; note = 2'-O-methylcytidine-3'-phosphate
  modified_base 13: mod_base = OTHER; note = 2'-O-methyladenosine-3'-phosphate
  modified_base 14: mod_base = OTHER; note = 2'-O-methyladenosine-3'-phosphate
  modified_base 15: mod_base = OTHER; note = 2'-O-methyladenosine-3'-phosphate
  modified_base 16: mod_base = OTHER; note = 2'-O-methylcytidine-3'-phosphate
  modified_base 17: mod_base = OTHER; note = 2'-O-methyluridine-3'-phosphate
  modified_base 18: mod_base = OTHER; note = 2'-O-methylguanosine-3'-phosphate
  modified_base 19: mod_base = OTHER; note = 2'-O-methylcytidine-3'-phosphate
  modified_base 20: mod_base = OTHER; note = 2'-O-methylcytidine-3'-phosphate
  modified_base 21: mod_base = OTHER; note = 2'-O-methylguanosine-3'-phosphate ((2S,4R)-1-[29-[[2-(acetylamino)-2-deoxy-beta-D-galactopyra nosyl]oxy]-14,14-bis[[3-[[3-[[5-[[2-(acetylamino)-2-deoxy-b eta-D-galactopyranosyl]oxy]-1-oxopentyl]amino]propyl]amino] -3-oxopropoxy]methyl]-1,12,19,25-tetraoxo-16-oxa-13,20,24-t riazanonacos-1-yl]-4-hydroxy-2-pyrrolidinyl)methyl ester
cgtaacagattcaaactgccg

SEQ ID NO: 2973 - RNA, 23 nt, synthetic construct
  source 1..23: mol_type = other RNA
  modified_base 1: mod_base = OTHER; note = 2'-O-methylcytidine-3'-phosphorothioate
  modified_base 2: mod_base = OTHER; note = 2'-deoxy-2'-fluoroguanosine-3'-phosphorothioate
  modified_base 3: mod_base = OTHER; note = 2'-O-methylguanosine-3'-phosphate
  modified_base 4: mod_base = OTHER; note = 2'-O-methylcytidine-3'-phosphate
  modified_base 5: mod_base = OTHER; note = 2'-O-methyladenosine-3'-phosphate
  modified_base 6: mod_base = OTHER; note = 2'-deoxy-2'-fluoroguanosine-3'-phosphate
  modified_base 7: mod_base = OTHER; note = 2'-O-methyluridine-3'-phosphate
  modified_base 8: mod_base = OTHER; note = 2'-deoxy-2'-fluorouridine-3'-phosphate
  modified_base 9: mod_base = OTHER; note = 2'-deoxy-2'-fluorouridine-3'-phosphate
  modified_base 10: mod_base = OTHER; note = 2'-O-methylguanosine-3'-phosphate
  modified_base 11: mod_base = OTHER; note = 2'-O-methyladenosine-3'-phosphate
  modified_base 12: mod_base = OTHER; note = 2'-O-methyladenosine-3'-phosphate
  modified_base 13: mod_base = OTHER; note = 2'-O-methyluridine-3'-phosphate
  modified_base 14: mod_base = OTHER; note = 2'-deoxy-2'-fluorocytidine-3'-phosphate
  modified_base 15: mod_base = OTHER; note = 2'-O-methyluridine-3'-phosphate
  modified_base 16: mod_base = OTHER; note = 2'-deoxy-2'-fluoroguanosine-3'-phosphate
  modified_base 17: mod_base = OTHER; note = 2'-O-methyluridine-3'-phosphate
  modified_base 18: mod_base = OTHER; note = 2'-O-methyluridine-3'-phosphate
  modified_base 19: mod_base = OTHER; note = 2'-O-methyladenosine-3'-phosphate
  modified_base 20: mod_base = OTHER; note = 2'-O-methylcytidine-3'-phosphate
  modified_base 21: mod_base = OTHER; note = 2'-O-methylguanosine-3'-phosphorothioate
  modified_base 22: mod_base = OTHER; note = 2'-O-methylcytidine-3'-phosphorothioate
  modified_base 23: mod_base = OTHER; note = 2'-O-methyladenosine
cggcagtttgaatctgttacgca

SEQ ID NO: 2974 - RNA, 21 nt, synthetic construct
  source 1..21: mol_type = other RNA
  modified_base 1: mod_base = OTHER; note = 2'-O-methyladenosine-3'-phosphorothioate
  modified_base 2: mod_base = OTHER; note = 2'-O-methyluridine-3'-phosphorothioate
  modified_base 3: mod_base = OTHER; note = 2'-O-methylguanosine-3'-phosphate
  modified_base 4: mod_base = OTHER; note = 2'-O-methyluridine-3'-phosphate
  modified_base 5: mod_base = OTHER; note = 2'-O-methylguanosine-3'-phosphate
  modified_base 6: mod_base = OTHER; note = 2'-O-methylcytidine-3'-phosphate
  modified_base 7: mod_base = OTHER; note = 2'-deoxy-2'-fluoroguanosine-3'-phosphate
  modified_base 8: mod_base = OTHER; note = 2'-O-methyluridine-3'-phosphate
  modified_base 9: mod_base = OTHER; note = 2'-deoxy-2'-fluoroadenosine-3'-phosphate
  modified_base 10: mod_base = OTHER; note = 2'-deoxy-2'-fluoroadenosine-3'-phosphate
  modified_base 11: mod_base = OTHER; note = 2'-deoxy-2'-fluorocytidine-3'-phosphate
  modified_base 12: mod_base = OTHER; note = 2'-O-methyladenosine-3'-phosphate
  modified_base 13: mod_base = OTHER; note = 2'-O-methylguanosine-3'-phosphate
  modified_base 14: mod_base = OTHER; note = 2'-O-methyladenosine-3'-phosphate
  modified_base 15: mod_base = OTHER; note = 2'-O-methyluridine-3'-phosphate
  modified_base 16: mod_base = OTHER; note = 2'-O-methyluridine-3'-phosphate
  modified_base 17: mod_base = OTHER; note = 2'-O-methylcytidine-3'-phosphate
  modified_base 18: mod_base = OTHER; note = 2'-O-methyladenosine-3'-phosphate
  modified_base 19: mod_base = OTHER; note = 2'-O-methyladenosine-3'-phosphate
  modified_base 20: mod_base = OTHER; note = 2'-O-methyladenosine-3'-phosphate
  modified_base 21: mod_base = OTHER; note = 2'-O-methylcytidine-3'-phosphate ((2S,4R)-1-[29-[[2-(acetylamino)-2-deoxy-beta-D-galactopyra nosyl]oxy]-14,14-bis[[3-[[3-[[5-[[2-(acetylamino)-2-deoxy-b eta-D-galactopyranosyl]oxy]-1-oxopentyl]amino]propyl]amino] -3-oxopropoxy]methyl]-1,12,19,25-tetraoxo-16-oxa-13,20,24-t riazanonacos-1-yl]-4-hydroxy-2-pyrrolidinyl)methyl ester
atgtgcgtaacagattcaaac

SEQ ID NO: 2975 - RNA, 23 nt, synthetic construct
  source 1..23: mol_type = other RNA
  modified_base 1: mod_base = OTHER; note = 2'-O-methylguanosine-3'-phosphorothioate
  modified_base 2: mod_base = OTHER; note = 2'-deoxy-2'-fluorouridine-3'-phosphorothioate
  modified_base 3: mod_base = OTHER; note = 2'-O-methyluridine-3'-phosphate
  modified_base 4: mod_base = OTHER; note = 2'-O-methyluridine-3'-phosphate
  modified_base 5: mod_base = OTHER; note = 2'-O-methylguanosine-3'-phosphate
  modified_base 6: mod_base = OTHER; note = 2'-deoxy-2'-fluoroadenosine-3'-phosphate
  modified_base 7: mod_base = OTHER; note = 2'-O-methyladenosine-3'-phosphate
  modified_base 8: mod_base = OTHER; note = 2'-deoxy-2'-fluorouridine-3'-phosphate
  modified_base 9: mod_base = OTHER; note = 2'-deoxy-2'-fluorocytidine-3'-phosphate
  modified_base 10: mod_base = OTHER; note = 2'-O-methyluridine-3'-phosphate
  modified_base 11: mod_base = OTHER; note = 2'-O-methylguanosine-3'-phosphate
  modified_base 12: mod_base = OTHER; note = 2'-O-methyluridine-3'-phosphate
  modified_base 13: mod_base = OTHER; note = 2'-O-methyluridine-3'-phosphate
  modified_base 14: mod_base = OTHER; note = 2'-deoxy-2'-fluoroadenosine-3'-phosphate
  modified_base 15: mod_base = OTHER; note = 2'-O-methylcytidine-3'-phosphate
  modified_base 16: mod_base = OTHER; note = 2'-deoxy-2'-fluoroguanosine-3'-phosphate
  modified_base 17: mod_base = OTHER; note = 2'-O-methylcytidine-3'-phosphate
  modified_base 18: mod_base = OTHER; note = 2'-O-methyladenosine-3'-phosphate
  modified_base 19: mod_base = OTHER; note = 2'-O-methylcytidine-3'-phosphate
  modified_base 20: mod_base = OTHER; note = 2'-O-methyladenosine-3'-phosphate
  modified_base 21: mod_base = OTHER; note = 2'-O-methyluridine-3'-phosphorothioate
  modified_base 22: mod_base = OTHER; note = 2'-O-methylcytidine-3'-phosphorothioate
  modified_base 23: mod_base = OTHER; note = 2'-O-methyladenosine
gtttgaatctgttacgcacatca

SEQ ID NO: 2976 - RNA, 21 nt, synthetic construct
  source 1..21: mol_type = other RNA
  modified_base 1: mod_base = OTHER; note = 2'-O-methylguanosine-3'-phosphorothioate
  modified_base 2: mod_base = OTHER; note = 2'-O-methyladenosine-3'-phosphorothioate
  modified_base 3: mod_base = OTHER; note = 2'-O-methyluridine-3'-phosphate
  modified_base 4: mod_base = OTHER; note = 2'-O-methylguanosine-3'-phosphate
  modified_base 5: mod_base = OTHER; note = 2'-O-methyluridine-3'-phosphate
  modified_base 6: mod_base = OTHER; note = 2'-O-methylguanosine-3'-phosphate
  modified_base 7: mod_base = OTHER; note = 2'-deoxy-2'-fluorocytidine-3'-phosphate
  modified_base 8: mod_base = OTHER; note = 2'-O-methylguanosine-3'-phosphate
  modified_base 9: mod_base = OTHER; note = 2'-deoxy-2'-fluorouridine-3'-phosphate
  modified_base 10: mod_base = OTHER; note = 2'-deoxy-2'-fluoroadenosine-3'-phosphate
  modified_base 11: mod_base = OTHER; note = 2'-deoxy-2'-fluoroadenosine-3'-phosphate
  modified_base 12: mod_base = OTHER; note = 2'-O-methylcytidine-3'-phosphate
  modified_base 13: mod_base = OTHER; note = 2'-O-methyladenosine-3'-phosphate
  modified_base 14: mod_base = OTHER; note = 2'-O-methylguanosine-3'-phosphate
  modified_base 15: mod_base = OTHER; note = 2'-O-methyladenosine-3'-phosphate
  modified_base 16: mod_base = OTHER; note = 2'-O-methyluridine-3'-phosphate
  modified_base 17: mod_base = OTHER; note = 2'-O-methyluridine-3'-phosphate
  modified_base 18: mod_base = OTHER; note = 2'-O-methylcytidine-3'-phosphate
  modified_base 19: mod_base = OTHER; note = 2'-O-methyladenosine-3'-phosphate
  modified_base 20: mod_base = OTHER; note = 2'-O-methyladenosine-3'-phosphate
  modified_base 21: mod_base = OTHER; note = 2'-O-methyladenosine-3'-phosphate ((2S,4R)-1-[29-[[2-(acetylamino)-2-deoxy-beta-D-galactopyra nosyl]oxy]-14,14-bis[[3-[[3-[[5-[[2-(acetylamino)-2-deoxy-b eta-D-galactopyranosyl]oxy]-1-oxopentyl]amino]propyl]amino] -3-oxopropoxy]methyl]-1,12,19,25-tetraoxo-16-oxa-13,20,24-t riazanonacos-1-yl]-4-hydroxy-2-pyrrolidinyl)methyl ester
gatgtgcgtaacagattcaaa

SEQ ID NO: 2977 - RNA, 23 nt, synthetic construct
  source 1..23: mol_type = other RNA
  modified_base 1: mod_base = OTHER; note = 2'-O-methyluridine-3'-phosphorothioate
  modified_base 2: mod_base = OTHER; note = 2'-deoxy-2'-fluorouridine-3'-phosphorothioate
  modified_base 3: mod_base = OTHER; note = 2'-O-methyluridine-3'-phosphate
  modified_base 4: mod_base = OTHER; note = 2'-O-methylguanosine-3'-phosphate
  modified_base 5: mod_base = OTHER; note = 2'-O-methyladenosine-3'-phosphate
  modified_base 6: mod_base = OTHER; note = 2'-deoxy-2'-fluoroadenosine-3'-phosphate
  modified_base 7: mod_base = OTHER; note = 2'-O-methyluridine-3'-phosphate
  modified_base 8: mod_base = OTHER; note = 2'-deoxy-2'-fluorocytidine-3'-phosphate
  modified_base 9: mod_base = OTHER; note = 2'-deoxy-2'-fluorouridine-3'-phosphate
  modified_base 10: mod_base = OTHER; note = 2'-O-methylguanosine-3'-phosphate
  modified_base 11: mod_base = OTHER; note = 2'-O-methyluridine-3'-phosphate
  modified_base 12: mod_base = OTHER; note = 2'-O-methyluridine-3'-phosphate
  modified_base 13: mod_base = OTHER; note = 2'-O-methyladenosine-3'-phosphate
  modified_base 14: mod_base = OTHER; note = 2'-deoxy-2'-fluorocytidine-3'-phosphate
  modified_base 15: mod_base = OTHER; note = 2'-O-methylguanosine-3'-phosphate
  modified_base 16: mod_base = OTHER; note = 2'-deoxy-2'-fluorocytidine-3'-phosphate
  modified_base 17: mod_base = OTHER; note = 2'-O-methyladenosine-3'-phosphate
  modified_base 18: mod_base = OTHER; note = 2'-O-methylcytidine-3'-phosphate
  modified_base 19: mod_base = OTHER; note = 2'-O-methyladenosine-3'-phosphate
  modified_base 20: mod_base = OTHER; note = 2'-O-methyluridine-3'-phosphate
  modified_base 21: mod_base = OTHER; note = 2'-O-methylcytidine-3'-phosphorothioate
  modified_base 22: mod_base = OTHER; note = 2'-O-methyladenosine-3'-phosphorothioate
  modified_base 23: mod_base = OTHER; note = 2'-O-methyluridine
tttgaatctgttacgcacatcat

SEQ ID NO: 2978 - RNA, 21 nt, synthetic construct
  source 1..21: mol_type = other RNA
  modified_base 1: mod_base = OTHER; note = 2'-O-methyladenosine-3'-phosphorothioate
  modified_base 2: mod_base = OTHER; note = 2'-O-methylguanosine-3'-phosphorothioate
  modified_base 3: mod_base = OTHER; note = 2'-O-methyladenosine-3'-phosphate
  modified_base 4: mod_base = OTHER; note = 2'-O-methylguanosine-3'-phosphate
  modified_base 5: mod_base = OTHER; note = 2'-O-methyladenosine-3'-phosphate
  modified_base 6: mod_base = OTHER; note = 2'-O-methyladenosine-3'-phosphate
  modified_base 7: mod_base = OTHER; note = 2'-deoxy-2'-fluoroguanosine-3'-phosphate
  modified_base 8: mod_base = OTHER; note = 2'-O-methyladenosine-3'-phosphate
  modified_base 9: mod_base = OTHER; note = 2'-deoxy-2'-fluorouridine-3'-phosphate
  modified_base 10: mod_base = OTHER; note = 2'-deoxy-2'-fluoroguanosine-3'-phosphate
  modified_base 11: mod_base = OTHER; note = 2'-deoxy-2'-fluoroguanosine-3'-phosphate
  modified_base 12: mod_base = OTHER; note = 2'-O-methylguanosine-3'-phosphate
  modified_base 13: mod_base = OTHER; note = 2'-O-methylcytidine-3'-phosphate
  modified_base 14: mod_base = OTHER; note = 2'-O-methyluridine-3'-phosphate
  modified_base 15: mod_base = OTHER; note = 2'-O-methyladenosine-3'-phosphate
  modified_base 16: mod_base = OTHER; note = 2'-O-methylcytidine-3'-phosphate
  modified_base 17: mod_base = OTHER; note = 2'-O-methyladenosine-3'-phosphate
  modified_base 18: mod_base = OTHER; note = 2'-O-methyladenosine-3'-phosphate
  modified_base 19: mod_base = OTHER; note = 2'-O-methylguanosine-3'-phosphate
  modified_base 20: mod_base = OTHER; note = 2'-O-methylguanosine-3'-phosphate
  modified_base 21: mod_base = OTHER; note = 2'-O-methylcytidine-3'-phosphate ((2S,4R)-1-[29-[[2-(acetylamino)-2-deoxy-beta-D-galactopyra nosyl]oxy]-14,14-bis[[3-[[3-[[5-[[2-(acetylamino)-2-deoxy-b eta-D-galactopyranosyl]oxy]-1-oxopentyl]amino]propyl]amino] -3-oxopropoxy]methyl]-1,12,19,25-tetraoxo-16-oxa-13,20,24-t riazanonacos-1-yl]-4-hydroxy-2-pyrrolidinyl)methyl ester
agagaagatgggctacaaggc

SEQ ID NO: 2979 - RNA, 23 nt, synthetic construct
  source 1..23: mol_type = other RNA
  modified_base 1: mod_base = OTHER; note = 2'-O-methylguanosine-3'-phosphorothioate
  modified_base 2: mod_base = OTHER; note = 2'-deoxy-2'-fluorocytidine-3'-phosphorothioate
  modified_base 3: mod_base = OTHER; note = 2'-O-methylcytidine-3'-phosphate
  modified_base 4: mod_base = OTHER; note = 2'-O-methyluridine-3'-phosphate
  modified_base 5: mod_base = OTHER; note = 2'-O-methyluridine-3'-phosphate
  modified_base 6: mod_base = OTHER; note = 2'-deoxy-2'-fluoroguanosine-3'-phosphate
  modified_base 7: mod_base = OTHER; note = 2'-O-methyluridine-3'-phosphate
  modified_base 8: mod_base = OTHER; note = 2'-deoxy-2'-fluoroadenosine-3'-phosphate
  modified_base 9: mod_base = OTHER; note = 2'-deoxy-2'-fluoroguanosine-3'-phosphate
  modified_base 10: mod_base = OTHER; note = 2'-O-methylcytidine-3'-phosphate
  modified_base 11: mod_base = OTHER; note = 2'-O-methylcytidine-3'-phosphate
  modified_base 12: mod_base = OTHER; note = 2'-O-methylcytidine-3'-phosphate
  modified_base 13: mod_base = OTHER; note = 2'-O-methyladenosine-3'-phosphate
  modified_base 14: mod_base = OTHER; note = 2'-deoxy-2'-fluorouridine-3'-phosphate
  modified_base 15: mod_base = OTHER; note = 2'-O-methylcytidine-3'-phosphate
  modified_base 16: mod_base = OTHER; note = 2'-deoxy-2'-fluorouridine-3'-phosphate
  modified_base 17: mod_base = OTHER; note = 2'-O-methyluridine-3'-phosphate
  modified_base 18: mod_base = OTHER; note = 2'-O-methylcytidine-3'-phosphate
  modified_base 19: mod_base = OTHER; note = 2'-O-methyluridine-3'-phosphate
  modified_base 20: mod_base = OTHER; note = 2'-O-methylcytidine-3'-phosphate
  modified_base 21: mod_base = OTHER; note = 2'-O-methyluridine-3'-phosphorothioate
  modified_base 22: mod_base = OTHER; note = 2'-O-methylguanosine-3'-phosphorothioate
  modified_base 23: mod_base = OTHER; note = 2'-O-methylcytidine
gccttgtagcccatcttctctgc

SEQ ID NO: 2980 - RNA, 21 nt, synthetic construct
  source 1..21: mol_type = other RNA
  modified_base 1: mod_base = OTHER; note = 2'-O-methylguanosine-3'-phosphorothioate
  modified_base 2: mod_base = OTHER; note = 2'-O-methyladenosine-3'-phosphorothioate
  modified_base 3: mod_base = OTHER; note = 2'-O-methylguanosine-3'-phosphate
  modified_base 4: mod_base = OTHER; note = 2'-O-methyladenosine-3'-phosphate
  modified_base 5: mod_base = OTHER; note = 2'-O-methyladenosine-3'-phosphate
  modified_base 6: mod_base = OTHER; note = 2'-O-methylguanosine-3'-phosphate
  modified_base 7: mod_base = OTHER; note = 2'-deoxy-2'-fluoroadenosine-3'-phosphate
  modified_base 8: mod_base = OTHER; note = 2'-O-methyluridine-3'-phosphate
  modified_base 9: mod_base = OTHER; note = 2'-deoxy-2'-fluoroguanosine-3'-phosphate
  modified_base 10: mod_base = OTHER; note = 2'-deoxy-2'-fluoroguanosine-3'-phosphate
  modified_base 11: mod_base = OTHER; note = 2'-deoxy-2'-fluoroguanosine-3'-phosphate
  modified_base 12: mod_base = OTHER; note = 2'-O-methylcytidine-3'-phosphate
  modified_base 13: mod_base = OTHER; note = 2'-O-methyluridine-3'-phosphate
  modified_base 14: mod_base = OTHER; note = 2'-O-methyladenosine-3'-phosphate
  modified_base 15: mod_base = OTHER; note = 2'-O-methylcytidine-3'-phosphate
  modified_base 16: mod_base = OTHER; note = 2'-O-methyladenosine-3'-phosphate
  modified_base 17: mod_base = OTHER; note = 2'-O-methyladenosine-3'-phosphate
  modified_base 18: mod_base = OTHER; note = 2'-O-methylguanosine-3'-phosphate
  modified_base 19: mod_base = OTHER; note = 2'-O-methylguanosine-3'-phosphate
  modified_base 20: mod_base = OTHER; note = 2'-O-methylcytidine-3'-phosphate
  modified_base 21: mod_base = OTHER; note = 2'-O-methylcytidine-3'-phosphate ((2S,4R)-1-[29-[[2-(acetylamino)-2-deoxy-beta-D-galactopyra nosyl]oxy]-14,14-bis[[3-[[3-[[5-[[2-(acetylamino)-2-deoxy-b eta-D-galactopyranosyl]oxy]-1-oxopentyl]amino]propyl]amino] -3-oxopropoxy]methyl]-1,12,19,25-tetraoxo-16-oxa-13,20,24-t riazanonacos-1-yl]-4-hydroxy-2-pyrrolidinyl)methyl ester
gagaagatgggctacaaggcc

SEQ ID NO: 2981 - RNA, 23 nt, synthetic construct
  source 1..23: mol_type = other RNA
  modified_base 1: mod_base = OTHER; note = 2'-O-methylguanosine-3'-phosphorothioate
  modified_base 2: mod_base = OTHER; note = 2'-deoxy-2'-fluoroguanosine-3'-phosphorothioate
  modified_base 3: mod_base = OTHER; note = 2'-O-methylcytidine-3'-phosphate
  modified_base 4: mod_base = OTHER; note = 2'-O-methylcytidine-3'-phosphate
  modified_base 5: mod_base = OTHER; note = 2'-O-methyluridine-3'-phosphate
  modified_base 6: mod_base = OTHER; note = 2'-deoxy-2'-fluorouridine-3'-phosphate
  modified_base 7: mod_base = OTHER; note = 2'-O-methylguanosine-3'-phosphate
  modified_base 8: mod_base = OTHER; note = 2'-deoxy-2'-fluorouridine-3'-phosphate
  modified_base 9: mod_base = OTHER; note = 2'-deoxy-2'-fluoroadenosine-3'-phosphate
  modified_base 10: mod_base = OTHER; note = 2'-O-methylguanosine-3'-phosphate
  modified_base 11: mod_base = OTHER; note = 2'-O-methylcytidine-3'-phosphate
  modified_base 12: mod_base = OTHER; note = 2'-O-methylcytidine-3'-phosphate
  modified_base 13: mod_base = OTHER; note = 2'-O-methylcytidine-3'-phosphate
  modified_base 14: mod_base = OTHER; note = 2'-deoxy-2'-fluoroadenosine-3'-phosphate
  modified_base 15: mod_base = OTHER; note = 2'-O-methyluridine-3'-phosphate
  modified_base 16: mod_base = OTHER; note = 2'-deoxy-2'-fluorocytidine-3'-phosphate
  modified_base 17: mod_base = OTHER; note = 2'-O-methyluridine-3'-phosphate
  modified_base 18: mod_base = OTHER; note = 2'-O-methyluridine-3'-phosphate
  modified_base 19: mod_base = OTHER; note = 2'-O-methylcytidine-3'-phosphate
  modified_base 20: mod_base = OTHER; note = 2'-O-methyluridine-3'-phosphate
  modified_base 21: mod_base = OTHER; note = 2'-O-methylcytidine-3'-phosphorothioate
  modified_base 22: mod_base = OTHER; note = 2'-O-methyluridine-3'-phosphorothioate
  modified_base 23: mod_base = OTHER; note = 2'-O-methylguanosine
ggccttgtagcccatcttctctg

SEQ ID NO: 2982 - RNA, 21 nt, synthetic construct
  source 1..21: mol_type = other RNA
  modified_base 1: mod_base = OTHER; note = 2'-O-methyladenosine-3'-phosphorothioate
  modified_base 2: mod_base = OTHER; note = 2'-O-methylguanosine-3'-phosphorothioate
  modified_base 3: mod_base = OTHER; note = 2'-O-methylguanosine-3'-phosphate
  modified_base 4: mod_base = OTHER; note = 2'-O-methylcytidine-3'-phosphate
  modified_base 5: mod_base = OTHER; note = 2'-O-methyladenosine-3'-phosphate
  modified_base 6: mod_base = OTHER; note = 2'-O-methylguanosine-3'-phosphate
  modified_base 7: mod_base = OTHER; note = 2'-deoxy-2'-fluoroadenosine-3'-phosphate
  modified_base 8: mod_base = OTHER; note = 2'-O-methylguanosine-3'-phosphate
  modified_base 9: mod_base = OTHER; note = 2'-deoxy-2'-fluoroadenosine-3'-phosphate
  modified_base 10: mod_base = OTHER; note = 2'-deoxy-2'-fluoroadenosine-3'-phosphate
  modified_base 11: mod_base = OTHER; note = 2'-deoxy-2'-fluoroguanosine-3'-phosphate
  modified_base 12: mod_base = OTHER; note = 2'-O-methyladenosine-3'-phosphate
  modified_base 13: mod_base = OTHER; note = 2'-O-methyluridine-3'-phosphate
  modified_base 14: mod_base = OTHER; note = 2'-O-methylguanosine-3'-phosphate
  modified_base 15: mod_base = OTHER; note = 2'-O-methylguanosine-3'-phosphate
  modified_base 16: mod_base = OTHER; note = 2'-O-methylguanosine-3'-phosphate
  modified_base 17: mod_base = OTHER; note = 2'-O-methylcytidine-3'-phosphate
  modified_base 18: mod_base = OTHER; note = 2'-O-methyluridine-3'-phosphate
  modified_base 19: mod_base = OTHER; note = 2'-O-methyladenosine-3'-phosphate
  modified_base 20: mod_base = OTHER; note = 2'-O-methylcytidine-3'-phosphate
  modified_base 21: mod_base = OTHER; note = 2'-O-methyladenosine-3'-phosphate ((2S,4R)-1-[29-[[2-(acetylamino)-2-deoxy-beta-D-galactopyra nosyl]oxy]-14,14-bis[[3-[[3-[[5-[[2-(acetylamino)-2-deoxy-b eta-D-galactopyranosyl]oxy]-1-oxopentyl]amino]propyl]amino] -3-oxopropoxy]methyl]-1,12,19,25-tetraoxo-16-oxa-13,20,24-t riazanonacos-1-yl]-4-hydroxy-2-pyrrolidinyl)methyl ester
aggcagagaagatgggctaca

SEQ ID NO: 2983 - RNA, 23 nt, synthetic construct
  source 1..23: mol_type = other RNA
  modified_base 1: mod_base = OTHER; note = 2'-O-methyluridine-3'-phosphorothioate
  modified_base 2: mod_base = OTHER; note = 2'-deoxy-2'-fluoroguanosine-3'-phosphorothioate
  modified_base 3: mod_base = OTHER; note = 2'-O-methyluridine-3'-phosphate
  modified_base 4: mod_base = OTHER; note = 2'-O-methyladenosine-3'-phosphate
  modified_base 5: mod_base = OTHER; note = 2'-O-methylguanosine-3'-phosphate
  modified_base 6: mod_base = OTHER; note = 2'-deoxy-2'-fluorocytidine-3'-phosphate
  modified_base 7: mod_base = OTHER; note = 2'-O-methylcytidine-3'-phosphate
  modified_base 8: mod_base = OTHER; note = 2'-deoxy-2'-fluorocytidine-3'-phosphate
  modified_base 9: mod_base = OTHER; note = 2'-deoxy-2'-fluoroadenosine-3'-phosphate
  modified_base 10: mod_base = OTHER; note = 2'-O-methyluridine-3'-phosphate
  modified_base 11: mod_base = OTHER; note = 2'-O-methylcytidine-3'-phosphate
  modified_base 12: mod_base = OTHER; note = 2'-O-methyluridine-3'-phosphate
  modified_base 13: mod_base = OTHER; note = 2'-O-methyluridine-3'-phosphate
  modified_base 14: mod_base = OTHER; note = 2'-deoxy-2'-fluorocytidine-3'-phosphate
  modified_base 15: mod_base = OTHER; note = 2'-O-methyluridine-3'-phosphate
  modified_base 16: mod_base = OTHER; note = 2'-deoxy-2'-fluorocytidine-3'-phosphate
  modified_base 17: mod_base = OTHER; note = 2'-O-methyluridine-3'-phosphate
  modified_base 18: mod_base = OTHER; note = 2'-O-methylguanosine-3'-phosphate
  modified_base 19: mod_base = OTHER; note = 2'-O-methylcytidine-3'-phosphate
  modified_base 20: mod_base = OTHER; note = 2'-O-methylcytidine-3'-phosphate
  modified_base 21: mod_base = OTHER; note = 2'-O-methyluridine-3'-phosphorothioate
  modified_base 22: mod_base = OTHER; note = 2'-O-methylguanosine-3'-phosphorothioate
  modified_base 23: mod_base = OTHER; note = 2'-O-methylcytidine
tgtagcccatcttctctgcctgc

SEQ ID NO: 2984 - RNA, 21 nt, synthetic construct
  source 1..21: mol_type = other RNA
  modified_base 1: mod_base = OTHER; note = 2'-O-methylcytidine-3'-phosphorothioate
  modified_base 2: mod_base = OTHER; note = 2'-O-methyladenosine-3'-phosphorothioate
  modified_base 3: mod_base = OTHER; note = 2'-O-methylguanosine-3'-phosphate
  modified_base 4: mod_base = OTHER; note = 2'-O-methylguanosine-3'-phosphate
  modified_base 5: mod_base = OTHER; note = 2'-O-methylcytidine-3'-phosphate
  modified_base 6: mod_base = OTHER; note = 2'-O-methyladenosine-3'-phosphate
  modified_base 7: mod_base = OTHER; note = 2'-deoxy-2'-fluoroguanosine-3'-phosphate
  modified_base 8: mod_base = OTHER; note = 2'-O-methyladenosine-3'-phosphate
  modified_base 9: mod_base = OTHER; note = 2'-deoxy-2'-fluoroguanosine-3'-phosphate
  modified_base 10: mod_base = OTHER; note = 2'-deoxy-2'-fluoroadenosine-3'-phosphate
  modified_base 11: mod_base = OTHER; note = 2'-deoxy-2'-fluoroadenosine-3'-phosphate
  modified_base 12: mod_base = OTHER; note = 2'-O-methylguanosine-3'-phosphate
  modified_base 13: mod_base = OTHER; note = 2'-O-methyladenosine-3'-phosphate
  modified_base 14: mod_base = OTHER; note = 2'-O-methyluridine-3'-phosphate
  modified_base 15: mod_base = OTHER; note = 2'-O-methylguanosine-3'-phosphate
  modified_base 16: mod_base = OTHER; note = 2'-O-methylguanosine-3'-phosphate
  modified_base 17: mod_base = OTHER; note = 2'-O-methylguanosine-3'-phosphate
  modified_base 18: mod_base = OTHER; note = 2'-O-methylcytidine-3'-phosphate
  modified_base 19: mod_base = OTHER; note = 2'-O-methyluridine-3'-phosphate
  modified_base 20: mod_base = OTHER; note = 2'-O-methyladenosine-3'-phosphate
  modified_base 21: mod_base = OTHER; note = 2'-O-methylcytidine-3'-phosphate ((2S,4R)-1-[29-[[2-(acetylamino)-2-deoxy-beta-D-galactopyra nosyl]oxy]-14,14-bis[[3-[[3-[[5-[[2-(acetylamino)-2-deoxy-b eta-D-galactopyranosyl]oxy]-1-oxopentyl]amino]propyl]amino] -3-oxopropoxy]methyl]-1,12,19,25-tetraoxo-16-oxa-13,20,24-t riazanonacos-1-yl]-4-hydroxy-2-pyrrolidinyl)methyl ester
caggcagagaagatgggctac

SEQ ID NO: 2985 - RNA, 23 nt, synthetic construct
  source 1..23: mol_type = other RNA
  modified_base 1: mod_base = OTHER; note = 2'-O-methylguanosine-3'-phosphorothioate
  modified_base 2: mod_base = OTHER; note = 2'-deoxy-2'-fluorouridine-3'-phosphorothioate
  modified_base 3: mod_base = OTHER; note = 2'-O-methyladenosine-3'-phosphate
  modified_base 4: mod_base = OTHER; note = 2'-O-methylguanosine-3'-phosphate
  modified_base 5: mod_base = OTHER; note = 2'-O-methylcytidine-3'-phosphate
  modified_base 6: mod_base = OTHER; note = 2'-deoxy-2'-fluorocytidine-3'-phosphate
  modified_base 7: mod_base = OTHER; note = 2'-O-methylcytidine-3'-phosphate
  modified_base 8: mod_base = OTHER; note = 2'-deoxy-2'-fluoroadenosine-3'-phosphate
  modified_base 9: mod_base = OTHER; note = 2'-deoxy-2'-fluorouridine-3'-phosphate
  modified_base 10: mod_base = OTHER; note = 2'-O-methylcytidine-3'-phosphate
  modified_base 11: mod_base = OTHER; note = 2'-O-methyluridine-3'-phosphate
  modified_base 12: mod_base = OTHER; note = 2'-O-methyluridine-3'-phosphate
  modified_base 13: mod_base = OTHER; note = 2'-O-methylcytidine-3'-phosphate
  modified_base 14: mod_base = OTHER; note = 2'-deoxy-2'-fluorouridine-3'-phosphate
  modified_base 15: mod_base = OTHER; note = 2'-O-methylcytidine-3'-phosphate
  modified_base 16: mod_base = OTHER; note = 2'-deoxy-2'-fluorouridine-3'-phosphate
  modified_base 17: mod_base = OTHER; note = 2'-O-methylguanosine-3'-phosphate
  modified_base 18: mod_base = OTHER; note = 2'-O-methylcytidine-3'-phosphate
  modified_base 19: mod_base = OTHER; note = 2'-O-methylcytidine-3'-phosphate
  modified_base 20: mod_base = OTHER; note = 2'-O-methyluridine-3'-phosphate
  modified_base 21: mod_base = OTHER; note = 2'-O-methylguanosine-3'-phosphorothioate
  modified_base 22: mod_base = OTHER; note = 2'-O-methylcytidine-3'-phosphorothioate
  modified_base 23: mod_base = OTHER; note = 2'-O-methylcytidine
gtagcccatcttctctgcctgcc

SEQ ID NO: 2986 - DNA, 1801 bp, Macaca fascicularis; identical to SEQ ID NO: 5
  source 1..1801: mol_type = genomic DNA

SEQ ID NO: 2987 - DNA, 2029 bp, Mus musculus
  source 1..2029: mol_type = genomic DNA
ggttgccctaccctgccacaatgttgcctcgactggtctgcatcagtgattatgaacagcatgtccgatcagtgcttcagaagtcagtgtatgactattacaggtctggggcaaatgatcaggagacgttagctgataacatccaagcattttctagatggaagctctatccacggatgcttcgcaacgttgctgatatcgatctgtcaacttctgttttaggacagagagtcagcatgccaatatgtgttggggctactgccatgcagtgcatggctcacgtggacggggagctggccactgtgcgagcctgtcagaccatgggaactggcatgatgctgagttcttgggctacctcctcaatagaagaagtggcagaagctggcccagaggcacttcgctggatgcaactgtacatctacaaagaccgtgagatcagcagacagatagtgaagcgagctgagaagcagggttacaaggccatatttgtgactgtggacaccccttacctgggcaaccgcattgatgacgtgcggaacaggttcaagctgccaccacaactcaggatgaaaaactttgaaaccaatgatttggcattttctcctaagggaaattttggagacaacagtggacttgctgaatatgtggcacaagctatagacccatctctcagctgggatgatattacatggctcagacgattgacatcactgcctattgttgtaaagggcattttgagaggtgatgatgccaaggaagctgttaaacatggtgtggatgggatcttggtgtcgaatcatggggcgcgacaactggatggggtgccagctactattgatgtcctgccagagattgttgaggctgtggaagggaaggtagaagtcttcctggatgggggagtaaggaaaggtactgatgttctcaaagctctggccctaggagccaaggccgtttttgtgggaagacccatcatctggggcttggctttccagggggagaaaggtgttcaagatgtcctcgagatattgaaggaagaattccgactggccatggctctgagtgggtgccagaatgtgaaagtcatcgacaagacattggtgaggaaaaatcctttggctgtttccaagatctgacagtgcacaatattttcccatctgtattattttttttccagcgtggattacttgacaaagagacactgtgcagagggtgaccacagactgtaactccccacttctatacaaagggtgtcgttcttttccaacaaaatagccaccccttttccttcattgcttttgacttttcaatgggtgtcctaggaaccttctagaaagaaatggacttgcatcctggaaatatattaactgttaaaaagaaaacattgaaaatgtgtttgggcaacgtcatcccctggcaggctaaagtgctggggaacaaaagatatcctctggtgagattgcaggtagcatgctgaagtgaaagatactgacctcactgttcattaacctgtcttctgtttagatttccttaagacagtggctcttacagtttgcacttggctttgaaatgctggaaatgcccagagaaacatgaggtttggatttgccatgttgagaaaatagcaccaggtagaattgaaatggatggtggtaatttgtgattttttttctagaaacttttcattttttaacaccctatttttttgaaggtagatttttagctatatatcacacgtctgaatatgtctggatgttttgtggcactcattgcatttgaaagggatgtgtctagtccagttgggaccacatggagctatttttacttttgaactttgtctcctcattctcattttaaaataagtgttgacttcctaattcctcttgaatcttttttgattttctcacttttcctcatttatagtcacattcagtgtaaagtacatattttgtggggtccgtgatgaataaagatttgaaattcttgttcagaaggaaggcaaaaaaaaaaaaaagtctttccttttatcaca

SEQ ID NO: 2988 - DNA, 1527 bp, Rattus norvegicus
  source 1..1527: mol_type = genomic DNA
catcccctgacacaatgttgcctcggctggtctgcatcagtgactatgaacagcatgcccggacagtgcttcagaagtcagtatatgattattacaagtctggggcaaatgaccaggagactttggctgataatatcagagcattttctaggtggaagctctatccacggatgctgcgcaacgttgctgatatcgacctgtcgacttctgttttaggacagagagtgagcatgccaatatgcgttggggctacggctatgcagtgcatggctcatgtggatggggagctggccactgttcgagcctgtcagaccatgggaactggcatgatgttgagttcctgggccacttcctcaatagaagaggtggcagaggctggcccggaggcacttcgctggatgcaactctacatctacaaagatcgtgaggtcagcagtcagctagtgaagagggctgagcagatgggttacaaggccatatttgtgactgtggacaccccttacctgggaaatcgcttcgatgatgtgcggaacaggttcaagctaccaccacagctcaggatgaaaaactttgaaaccaacgatttggcattttctcctaaggggaattttggagacaacagtggccttgctgaatatgtggcacaagccatagacccatctctcagctgggatgatattaaatggctcagacggttgacctcactgcccattgttgtaaagggaattttgagaggtgatgatgcccaggaagctgttaaacatggtgtggatgggatcttagtgtcgaatcatggggcacgacaactggatggggtgccagctactattgatgccctgccagagatcgttgaggctgtggaagggaaggtagaagtcttcctggatgggggagtcaggaaaggcaccgatgttctcaaagctctggccctgggagccagagctgtttttgtggggagacccatcatctggggcttggctttccagggggagaaaggtgttcaagatgtcctcgagatactgaaggaagagttccggctggccatggctctgagtgggtgccagaatgtgaaagtcatcgacaagacattggtgaggaaaaatcctttggctgtttccaagatctgacagtgcacaatattttcccatctgtattatttttttccagcatggattacttgacaaagagacactgtgcagagggtgaccacagactgtaactccccacttcaacacaaagggtgtcgttcttttccaacaaaatagccaccccttctccttcattgcttttgacttttcaatgggtgtcctaggaaccttctagaaagaaatggacttgcatcctggaaatatattaactgttaaaaagaaaacattgaaaatgtgtttgggcaacgtcatcccctggcaggctaaagtgagggggaacaaaagatatcctctggtgagattggaggtagcatgccgaagtaaaagacactgacctcactgtttattaaaaaaaaaaaaaaaaaaaaaaaaaaaaaaa

SEQ ID NO: 2989 - DNA, 1746 bp, Homo sapiens; identical to SEQ ID NO: 3
  source 1..1746: mol_type = genomic DNA

SEQ ID NO: 2990 - DNA, 1801 bp, Macaca fascicularis; identical to SEQ ID NO: 7
  source 1..1801: mol_type = genomic DNA

SEQ ID NO: 2991 - DNA, 2029 bp, Mus musculus; identical to SEQ ID NO: 4
  source 1..2029: mol_type = genomic DNA

SEQ ID NO: 2992 - DNA, 1527 bp, Rattus norvegicus
  source 1..1527: mol_type = genomic DNA
tttttttttttttttttttttttttttttttaataaacagtgaggtcagtgtcttttacttcggcatgctacctccaatctcaccagaggatatcttttgttccccctcactttagcctgccaggggatgacgttgcccaaacacattttcaatgttttctttttaacagttaatatatttccaggatgcaagtccatttctttctagaaggttcctaggacacccattgaaaagtcaaaagcaatgaaggagaaggggtggctattttgttggaaaagaacgacaccctttgtgttgaagtggggagttacagtctgtggtcaccctctgcacagtgtctctttgtcaagtaatccatgctggaaaaaaataatacagatgggaaaatattgtgcactgtcagatcttggaaacagccaaaggatttttcctcaccaatgtcttgtcgatgactttcacattctggcacccactcagagccatggccagccggaactcttccttcagtatctcgaggacatcttgaacacctttctccccctggaaagccaagccccagatgatgggtctccccacaaaaacagctctggctcccagggccagagctttgagaacatcggtgcctttcctgactcccccatccaggaagacttctaccttcccttccacagcctcaacgatctctggcagggcatcaatagtagctggcaccccatccagttgtcgtgccccatgattcgacactaagatcccatccacaccatgtttaacagcttcctgggcatcatcacctctcaaaattccctttacaacaatgggcagtgaggtcaaccgtctgagccatttaatatcatcccagctgagagatgggtctatggcttgtgccacatattcagcaaggccactgttgtctccaaaattccccttaggagaaaatgccaaatcgttggtttcaaagtttttcatcctgagctgtggtggtagcttgaacctgttccgcacatcatcgaagcgatttcccaggtaaggggtgtccacagtcacaaatatggccttgtaacccatctgctcagccctcttcactagctgactgctgacctcacgatctttgtagatgtagagttgcatccagcgaagtgcctccgggccagcctctgccacctcttctattgaggaagtggcccaggaactcaacatcatgccagttcccatggtctgacaggctcgaacagtggccagctccccatccacatgagccatgcactgcatagccgtagccccaacgcatattggcatgctcactctctgtcctaaaacagaagtcgacaggtcgatatcagcaacgttgcgcagcatccgtggatagagcttccacctagaaaatgctctgatattatcagccaaagtctcctggtcatttgccccagacttgtaataatcatatactgacttctgaagcactgtccgggcatgctgttcatagtcactgatgcagaccagccgaggcaacattgtgtcaggggatg
